(19) United States
(12) Patent Application Publication
(10) Pub. No.: US 2023/0167446 A1
(43) Pub. Date: Jun. 1, 2023

(54) COMPOUNDS AND METHODS FOR REDUCING PSD3 EXPRESSION

(71) Applicant: Ionis Pharmaceuticals, Inc., Carlsbad, CA (US)

(72) Inventors: Huynh-Hoa BUI, San Diego, CA (US); Susan M. FREIER, San Diego, CA (US); Richard LEE, Vista, CA (US)

(73) Assignee: Ionis Pharmaceuticals, Inc., Carlsbad, CA (US)

(21) Appl. No.: 18/051,089

(22) Filed: Oct. 31, 2022

Related U.S. Application Data
(60) Provisional application No. 63/274,405, filed on Nov. 1, 2021.

(51) Int. Cl. C12N 15/113; A61K 31/7105

(52) U.S. Cl. CPC C12N 15/113; A61K 31/7105; C12N 2310/315; C12N 2310/351; C12N 2310/3341; C12N 2310/321; C12N 2310/14; C12N 2310/322

(57) ABSTRACT

Provided are compositions of matter including oligomeric agents, modified oligonucleotides, oligomeric compounds, and pharmaceutical compositions, and methods of use thereof, for reducing the amount or activity of PSD3 RNA in a cell or animal, and in certain instances reducing the amount of PSD3 protein in a cell or animal. Such compositions are useful to treat liver disease, fatty liver disease (FLD), nonalcoholic fatty liver disease (NAFLD), hepatic steatosis, non-alcoholic steatohepatitis (NASH), liver cirrhosis, hepatocellular carcinoma, alcoholic liver disease, alcoholic steatohepatitis (ASH), HCV hepatitis, chronic hepatitis, hereditary hemochromatosis, or primary sclerosing cholangitis.

### SEQUENCE LISTING

[0001] The present application is being filed along with a Sequence Listing in electronic format. The Sequence Listing is provided as a file entitled 201185-WO-PCT Sequence Listing, created on Sep. 8, 2022 which is 3319 KB in size. The information in the electronic format of the sequence listing is incorporated herein by reference in its entirety. Although the sequence listing accompanying this filing identifies each sequence as either “RNA” or “DNA” as required, in reality, those sequences may be modified with any combination of chemical modifications. One of skill in the art will readily appreciate that such designation as “RNA” or “DNA” to describe modified oligonucleotides is, in certain instances, arbitrary. For example, an oligonucleotide comprising a nucleoside comprising a 2′-OH sugar moiety and a thymine base could be described as a DNA having a modified sugar (2′-OH in place of one 2′-H of DNA) or as an RNA having a modified base (thymine (methylated uracil) in place of an uracil of RNA). Accordingly, nucleic acid sequences provided herein, including, but not limited to those in the sequence listing, are intended to encompass nucleic acids containing any combination of natural or modified RNA and/or DNA, unless otherwise stated, including, but not limited to such nucleic acids having modified nucleobases.

### FIELD

[0002] Provided are oligomeric agents, oligomeric compounds, methods, and pharmaceutical compositions for reducing the amount or activity of PSD3 RNA in a cell or animal, and in certain instances reducing the amount of PSD3 protein in a cell or animal. Such oligomeric agents, oligomeric compounds, methods, and pharmaceutical compositions are useful to treat liver disease, fatty liver disease (FLD), nonalcoholic fatty liver disease (NAFLD), hepatic steatosis, non-alcoholic steatohepatitis (NASH), liver cirrhosis, hepatocellular carcinoma, alcoholic liver disease, alcoholic steatohepatitis (ASH), HCV hepatitis, chronic hepatitis, hereditary hemochromatosis, or primary sclerosing cholangitis.

### BACKGROUND

[0003] Non-alcoholic fatty liver disease (NAFLD) covers a spectrum of liver disease from steatosis to nonalcoholic steatohepatitis (NASH) and cirrhosis. NAFLD is defined as fat accumulation in the liver exceeding 5% by weight, in the absense of significant alcohol consumption, steatogenic medication, or hereditary disorders (Kotronen et al, Arterioscler Thromb. Vasc. Biol. 2008, 28: 27-38).

[0004] Non-alcoholic steatohepatitis (NASH) is NAFLD with signs of inflammation and hepatic injury. NASH is defined histologically by macrovesicular steatosis, hepatocellular ballooning, and lobular inflammatory infiltrates (Sanyal, Hepatol. Res. 2011. 41: 670-4). NASH is estimated to affect 2-3% of the general population. In the presence of other pathologies, such as obesity or diabetes, the estimated prevalence increases to 7% and 62% respectively (Hashimoto et al, J. Gastroenterol. 2011. 46(1): 63-69).

### SUMMARY

[0005] Oligomeric agents, oligomeric compounds, methods, and pharmaceutical compositions of certain embodiments described herein are useful for reducing or inhibiting PSD3 expression in a cell or animal. In certain embodiments, PSD3 RNA or protein levels can be reduced in a cell or animal.

[0006] Also provided are methods of treating liver disease, fatty liver disease (FLD), nonalcoholic fatty liver disease (NAFLD), hepatic steatosis, non-alcoholic steatohepatitis (NASH), liver cirrhosis, hepatocellular carcinoma, alcoholic liver disease, alcoholic steatohepatitis (ASH), HCV hepatitis, chronic hepatitis, hereditary hemochromatosis, or primary sclerosing cholangitis.

### DETAILED DESCRIPTION

[0007] It is to be understood that both the foregoing general description and the following detailed description are exemplary and explanatory only and are not restrictive. Herein, the use of the singular includes the plural unless specifically stated otherwise. As used herein, the use of “or” means “and/or” unless stated otherwise. Furthermore, the use of the term “including” as well as other forms, such as “includes” and “included”, is not limiting. Also, terms such as “element” or “component” encompass both elements and components comprising one unit and elements and components that comprise more than one subunit, unless specifically stated otherwise.

[0008] The section headings used herein are for organizational purposes only and are not to be construed as limiting the subject matter described. All documents, or portions of documents, cited in this application, including, but not limited to, patents, patent applications, articles, books, and treatises, are hereby expressly incorporated-by-reference for the portions of the document discussed herein, as well as in their entirety.

### Definitions

[0009] Unless specific definitions are provided, the nomenclature used in connection with, and the procedures and techniques of, analytical chemistry, synthetic organic chemistry, and medicinal and pharmaceutical chemistry described herein are those well-known and commonly used in the art.

[0010] Unless otherwise indicated, the following terms have the following meanings:

[0011] As used herein, “2′-deoxynucleoside” means a nucleoside comprising a 2′-H(H) deoxyfuranosyl sugar moiety. In certain embodiments, a 2′-deoxynucleoside is a 2′-β-D-deoxynucleoside and comprises a 2′-β-D-deoxyribosyl sugar moiety, which has the β-D ribosyl configuration as found in naturally occurring deoxyribonucleic acids (DNA). In certain embodiments, a 2′-deoxynucleoside may comprise a modified nucleobase or may comprise an RNA nucleobase (uracil).

[0012] As used herein, “2′-MOE” means a 2′-OCH₂CH₂OCH₃ group in place of the 2′-OH group of a fuanosyl sugar moiety. A “2′-MOE sugar moiety” means a sugar moiety with a 2′-OCH₂CH₂OCH₃ group in place of the 2′-OH group of a furanosyl sugar moiety. Unless otherwise indicated, a 2′-MOE sugar moiety is in the β-D-ribosyl configuration. “MOE” means O-methoxyethyl.

[0013] As used herein, “2′-MOE nucleoside” means a nucleoside comprising a 2′-MOE sugar moiety.

[0014] As used herein, “2′-OMe” means a 2′-OCH₃ group in place of the 2′-OH group of a furanosyl sugar moiety. A “2′-O-methyl sugar moiety” or “2′-OMe sugar moiety” means a sugar moiety with a 2′-OCH₃ group in place of the 2′-OH group of a furanosyl sugar moiety. Unless otherwise indicated, a 2′-MOE sugar moiety is in the β-D-ribosyl configuration.

[0015] As used herein, “2′-OMe nucleoside” means a nucleoside comprising a 2′-OMe sugar moiety.

[0016] As used herein, “2′-substituted nucleoside” means a nucleoside comprising a 2′-substituted sugar moiety. As used herein, “2′-substituted” in reference to a sugar moiety means a sugar moiety comprising at least one 2′-substituent group other than H or OH.

[0017] As used herein, “3′ target site” refers to the 3′-most nucleotide of a target nucleic acid which is complementary to an antisense oligonucleotide, when the antisense oligonucleotide is hybridized to the target nucleic acid.

[0018] As used herein, “5′ target site” refers to the 5′-most nucleotide of a target nucleic acid which is complementary to an antisense oligonucleotide, when the antisense oligonucleotide is hybridized to the target nucleic acid.

[0019] As used herein, “5-methylcytosine” means a cytosine modified with a methyl group attached to the 5 position. A 5-methyl cytosine is a modified nucleobase.

[0020] As used herein, “abasic sugar moiety” means a sugar moiety of a nucleoside that is not attached to a nucleobase. Such abasic sugar moieties are sometimes referred to in the art as “abasic nucleosides.”

[0021] As used herein, “bicyclic sugar” or “bicyclic sugar moiety” means a modified sugar moiety comprising two rings, wherein the second ring is formed via a bridge connecting two of the atoms in the first ring thereby forming a bicyclic structure. In certain embodiments, the first ring of the bicyclic sugar moiety is a furanosyl moiety. In certain embodiments, the bicyclic sugar moiety does not comprise a furanosyl moiety.

[0022] As used herein, “chirally enriched population” means a plurality of molecules of identical molecular formula, wherein the number or percentage of molecules within the population that contain a particular stereochemical configuration at a particular chiral center is greater than the number or percentage of molecules expected to contain the same particular stereochemical configuration at the same particular chiral center within the population if the particular chiral center were stereorandom. Chirally enriched populations of molecules having multiple chiral centers within each molecule may contain one or more stereorandom chiral centers. In certain embodiments, the molecules are modified oligonucleotides. In certain embodiments, the molecules are oligomeric compounds comprising modified oligonucleotides.

[0023] As used herein, “cleavable moiety” means a bond or group of atoms that is cleaved under physiological conditions, for example, inside a cell, an animal, or a human.

[0024] As used herein, “complementary” in reference to an oligonucleotide means that at least 70% of the nucleobases of the oligonucleotide and the nucleobases of another nucleic acid or one or more regions thereof are capable of hydrogen bonding with one another when the nucleobase sequence of the oligonucleotide and the other nucleic acid are aligned in opposing directions. “Complementary region” in reference to a region of an oligonucleotide means that at least 70% of the nucleobases of that region and the nucleobases of another nucleic acid or one or more regions thereof are capable of hydrogen bonding with one another when the nucleobase sequence of the oligonucleotide and the other nucleic acid are aligned in opposing directions. Complementary nucleobases mean nucleobases that are capable of forming hydrogen bonds with one another. Complementary nucleobase pairs include adenine (A) and thymine (T), adenine (A) and uracil (U), cytosine (C) and guanine (G), 5-methyl cytosine (mC) and guanine (G). Certain modified nucleobases that pair with natural nucleobases or with other modified nucleobases are known in the art and are not considered complementary nucleobases as defined herein unless indicated otherwise. For example, inosine can pair, but is not considered complementary, with adenosine, cytosine, or uracil. Complementary oligonucleotides and/or nucleic acids need not have nucleobase complementarity at each nucleoside. Rather, some mismatches are tolerated. As used herein, “fully complementary” or “100% complementary” in reference to oligonucleotides means that oligonucleotides are complementary to another oligonucleotide or nucleic acid at each nucleoside of the oligonucleotide.

[0025] As used herein, “conjugate group” means a group of atoms that is directly attached to an oligonucleotide. Conjugate groups include a conjugate moiety and a conjugate linker that attaches the conjugate moiety to the oligonucleotide.

[0026] As used herein, “conjugate linker” means a single bond or a group of atoms comprising at least one bond that connects a conjugate moiety to an oligonucleotide.

[0027] As used herein, “conjugate moiety” means a group of atoms that modifies one or more properties of a molecule compared to the identical molecule lacking the conjugate moiety, including but not limited to pharmacodynamics, pharmacokinetics, stability, binding, absorption, tissue distribution, cellular distribution, cellular uptake, charge and clearance.

[0028] As used herein, “constrained ethyl” or “cEt” or “cEt modified sugar moiety” means a β-D ribosyl bicyclic sugar moiety wherein the second ring of the bicyclic sugar is formed via a bridge connecting the 4′-carbon and the 2′-carbon of the β-D ribosyl sugar moiety, wherein the bridge has the formula 4′-CH(CH₃)—O-2′, and wherein the methyl group of the bridge is in the S configuration.

[0029] As used herein, “cEt nucleoside” means a nucleoside comprising a cEt modified sugar moiety.

[0030] As used herein, “deoxy region” means a region of 5-12 contiguous nucleotides, wherein at least 70% of the nucleosides comprise a β-D-2′-deoxyribosyl sugar moiety. In certain embodiments, a deoxy region is the gap of a gapmer.

[0031] As used herein, “hotspot region” is a range of nucleobases on a target nucleic acid that is amenable to oligomeric agent or oligomeric compound-mediated reduction of the amount or activity of the target nucleic acid.

[0032] As used herein, “internucleoside linkage” is the covalent linkage between adjacent nucleosides in an oligonucleotide. As used herein “modified internucleoside linkage” means any internucleoside linkage other than a phosphodiester internucleoside linkage.

[0033] As used herein, “linked nucleosides” are nucleosides that are connected in a contiguous sequence (i.e., no additional nucleosides are presented between those that are linked).

[0034] As used herein, “linker-nucleoside” means a nucleoside that links, either directly or indirectly, an oligonucleotide to a conjugate moiety. Linker-nucleosides are located within the conjugate linker of an oligomeric compound. Linker-nucleosides are not considered part of the oligonucleotide portion of an oligomeric compound even if they are contiguous with the oligonucleotide.

[0035] As used herein, “mismatch” or “non-complementary” means a nucleobase of a first nucleic acid sequence that is not complementary with the corresponding nucleobase of a second nucleic acid sequence or target nucleic acid when the first and second nucleic acid sequences are aligned.

[0036] As used herein, “motif” means the pattern of unmodified and/or modified sugar moieties, nucleobases, and/or internucleoside linkages, in an oligonucleotide.

[0037] As used herein, “modified nucleoside” means a nucleoside comprising a modified nucleobase and/or a modified sugar moiety.

[0038] As used herein, “non-bicyclic modified sugar moiety” means a modified sugar moiety that comprises a modification, such as a substituent, that does not form a bridge between two atoms of the sugar to form a second ring.

[0039] As used herein, “nucleobase” means an unmodified nucleobase or a modified nucleobase. A nucleobase is a heterocyclic moiety. As used herein an “unmodified nucleobase” is adenine (A), thymine (T), cytosine (C), uracil (U), or guanine (G). As used herein, a “modified nucleobase” is a group of atoms other than unmodified A, T, C, U, or G capable of pairing with at least one other nucleobase. A “5-methyl cytosine” is a modified nucleobase. A universal base is a modified nucleobase that can pair with any one of the five unmodified nucleobases.

[0040] As used herein, “nucleobase sequence” means the order of contiguous nucleobases in a nucleic acid or oligonucleotide independent of any sugar or internucleoside linkage modification. By way of example and without limitation, an oligomeric compound having the nucleobase sequence “ATCGATCG” encompasses any compounds having such nucleobase sequence, whether modified or unmodified, including, but not limited to, such compounds comprising RNA bases, such as those having sequence “AUCGAUCG” and those having some DNA bases and some RNA bases such as “AUCGATCG” and compounds having other modified nucleobases, such as “AT^{m}CGAUCG,” wherein ^{m}C indicates a cytosine base comprising a methyl group at the 5-position. Finally, for clarity, unless otherwise indicated, the phrase “nucleobase sequence of SEQ ID NO: X”, refers only to the sequence of nucleobases in that SEQ ID NO.: X, independent of any sugar or internucleoside linkage modifications also described in such SEQ ID.

[0041] As used herein, “nucleoside” means a compound or fragment of a compound comprising a nucleobase and a sugar moiety. The nucleobase and sugar moiety are each, independently, unmodified or modified.

[0042] As used herein, “oligomeric agent” means an oligomeric compound and optionally one or more additional features, such as a second oligomeric compound. An oligomeric agent may be a single-stranded oligomeric compound or may be an oligomeric duplex formed by two complementary oligomeric compounds.

[0043] As used herein, “oligomeric compound” means an oligonucleotide and optionally one or more additional features, such as a conjugate group or terminal group. An oligomeric compound may be paired with a second oligomeric compound that is complementary to the first oligomeric compound or may be unpaired. A “singled-stranded oligomeric compound” is an unpaired oligomeric compound.

[0044] The term “oligomeric duplex” means a duplex formed by two oligomeric compounds having complementary nucleobase sequences.

[0045] As used herein, “oligonucleotide” means a strand of linked nucleosides connected via internucleoside linkages, wherein each nucleoside and internucleoside linkage may be modified or unmodified. Unless otherwise indicated, oligonucleotides consist of 8-50 linked nucleosides. As used herein, “modified oligonucleotide” means an oligonucleotide, wherein at least one nucleoside or internucleoside linkage is modified. As used herein, “unmodified oligonucleotide” means an oligonucleotide that does not comprise any nucleoside modifications or internucleoside modifications.

[0046] As used herein, “pharmaceutically acceptable carrier or diluent” means any substance suitable for use in administering to an animal. Certain such carriers enable pharmaceutical compositions to be formulated as, for example, tablets, pills, dragees, capsules, liquids, gels, syrups, slurries, suspension and lozenges for the oral ingestion by a subject.

[0047] In certain embodiments, a pharmaceutically acceptable carrier or diluent is sterile water, sterile saline, sterile buffer solution or sterile artificial cerebrospinal fluid.

[0048] As used herein “pharmaceutically acceptable salts” means physiologically and pharmaceutically acceptable salts of compounds. Pharmaceutically acceptable salts retain the desired biological activity of the parent compound and do not impart undesired toxicological effects thereto.

[0049] As used herein “pharmaceutical composition” means a mixture of substances suitable for administering to a subject. For example, a pharmaceutical composition may comprise an oligomeric compound and a sterile aqueous solution. In certain embodiments, a pharmaceutical composition shows activity in free uptake assay in certain cell lines.

[0050] As used herein “prodrug” means a therapeutic agent in a first form outside the body that is converted to a second form within an animal or cells thereof. Typically, conversion of a prodrug within the animal is facilitated by the action of an enzymes (e.g., endogenous or viral enzyme) or chemicals present in cells or tissues and/or by physiologic conditions. In certain embodiments, the first form of the prodrug is less active than the second form.

[0051] As used herein, “stabilized phosphate group” means a 5′-phosphate analog that is metabolically more stable than a 5′-phosphate as naturally occurs on DNA or RNA.

[0052] As used herein, “standard cell assay” means the assays described in the Examples and reasonable variations thereof.

[0053] As used herein, “stereorandom chiral center” in the context of a population of molecules of identical molecular formula means a chiral center having a random stereochemical configuration. For example, in a population of molecules comprising a stereorandom chiral center, the number of molecules having the (S) configuration of the stereorandom chiral center may be but is not necessarily the same as the number of molecules having the (R) configuration of the stereorandom chiral center. The stereochemical configuration of a chiral center is considered random when it is the result of a synthetic method that is not designed to control the stereochemical configuration. In certain embodiments, a stereorandom chiral center is a stereorandom phosphorothioate internucleoside linkage.

[0054] As used herein, “sugar moiety” means an unmodified sugar moiety or a modified sugar moiety. As used herein, “unmodified sugar moiety” means a 2′-OH(H) ribosyl moiety, as found in RNA (an “unmodified RNA sugar moiety”), or a 2′-H(H) deoxyribosyl sugar moiety, as found in DNA (an “unmodified DNA sugar moiety”). Unmodified sugar moieties have one hydrogen at each of the 1′, 3′, and 4′ positions, an oxygen at the 3′ position, and two hydrogens at the 5′ position. As used herein, “modified sugar moiety” or “modified sugar” means a modified furanosyl sugar moiety or a sugar surrogate.

[0055] As used herein, “sugar surrogate” means a modified sugar moiety having other than a furanosyl moiety that can link a nucleobase to another group, such as an internucleoside linkage, conjugate group, or terminal group in an oligonucleotide. Modified nucleosides comprising sugar surrogates can be incorporated into one or more positions within an oligonucleotide and such oligonucleotides are capable of hybridizing to complementary oligomeric compounds or target nucleic acids.

[0056] As used herein, “target nucleic acid” and “target RNA” mean a nucleic acid that an oligomeric compound is designed to affect. Target RNA means an RNA transcript and includes pre-mRNA and mRNA unless otherwise specified.

[0057] As used herein, “target region” means a portion of a target nucleic acid to which an oligomeric compound is designed to hybridize.

[0058] As used herein, “terminal group” means a chemical group or group of atoms that is covalently linked to a terminus of an oligonucleotide.

[0059] As used herein, “antisense activity” means any detectable and/or measurable change attributable to the hybridization of an antisense compound to its target nucleic acid. In certain embodiments, antisense activity is a decrease in the amount or expression of a target nucleic acid or protein encoded by such target nucleic acid compared to target nucleic acid levels or target protein levels in the absence of the antisense compound. In certain embodiments, antisense activity is the modulation of splicing of a target pre-mRNA.

[0060] As used herein, “antisense agent” means an antisense compound and optionally one or more additional features, such as a sense compound.

[0061] As used herein, “antisense compound” means an antisense oligonucleotide and optionally one or more additional features, such as a conjugate group.

[0062] As used herein, “sense compound” means a sense oligonucleotide and optionally one or more additional features, such as a conjugate group.

[0063] As used herein, “antisense oligonucleotide” means an oligonucleotide, including the oligonucleotide portion of an antisense compound, that is capable of hybridizing to a target nucleic acid and is capable of at least one antisense activity. Antisense oligonucleotides include but are not limited to antisense RNAi oligonucleotides and antisense RNase H oligonucleotides.

[0064] As used herein, “sense oligonucleotide” means an oligonucleotide, including the oligonucleotide portion of a sense compound, that is capable of hybridizing to an antisense oligonucleotide.

[0065] As used herein, “gapmer” means a modified oligonucleotide comprising an internal region positioned between external regions having one or more nucleosides, wherein the nucleosides comprising the internal region are chemically distinct from the nucleoside or nucleosides comprising the external regions, and wherein the modified oligonucleotide supports RNAse H cleavage. The internal region may be referred to as the “gap” and the external regions may be referred to as the “wings.” In certain embodiments, the internal region is a deoxy region. The positions of the internal region or gap refer to the order of the nucleosides of the internal region and are counted starting from the 5′-end of the internal region. Unless otherwise indicated, “gapmer” refers to a sugar motif. In certain embodiments, each nucleoside of the gap is a 2′-β-D-deoxynucleoside. In certain embodiments, the gap comprises one 2′-substituted nucleoside at position 1, 2, 3, 4, or 5 of the gap, and the remainder of the nucleosides of the gap are 2′-β-D-deoxynucleosides. As used herein, the term “MOE gapmer” indicates a gapmer having a gap comprising 2′-β-D-deoxynucleosides and wings comprising 2′-MOE nucleosides. As used herein, the term “mixed wing gapmer” indicates a gapmer having wings comprising modified nucleosides comprising at least two different sugar modifications. Unless otherwise indicated, a gapmer may comprise one or more modified internucleoside linkages and/or modified nucleobases and such modifications do not necessarily follow the gapmer pattern of the sugar modifications.

[0066] As used herein, “cell-targeting moiety” means a conjugate group or portion of a conjugate group that is capable of binding to a particular cell type or particular cell types.

[0067] As used herein, “hybridization” means the annealing of oligonucleotides and/or nucleic acids. While not limited to a particular mechanism, the most common mechanism of hybridization involves hydrogen bonding, which may be Watson-Crick, Hoogsteen or reversed Hoogsteen hydrogen bonding, between complementary nucleobases. In certain embodiments, complementary nucleic acid molecules include, but are not limited to, an antisense compound and a nucleic acid target. In certain embodiments, complementary nucleic acid molecules include, but are not limited to, an oligonucleotide and a nucleic acid target.

[0068] As used herein, “RNAi agent” means an antisense agent that acts, at least in part, through RISC or Ago2 to modulate a target nucleic acid and/or protein encoded by a target nucleic acid. RNAi agents include, but are not limited to double-stranded siRNA, single-stranded RNAi (ssRNAi), and microRNA, including microRNA mimics. RNAi agents may comprise conjugate groups and/or terminal groups. In certain embodiments, an RNAi agent modulates the amount and/or activity, of a target nucleic acid. The term RNAi agent excludes antisense agents that act through RNase H.

[0069] As used herein, “RNase H agent” means an antisense agent that acts through RNase H to modulate a target nucleic acid and/or protein encoded by a target nucleic acid. In certain embodiments, RNase H agents are single-stranded. In certain embodiments, RNase H agents are double-stranded. RNase H compounds may comprise conjugate groups and/or terminal groups. In certain embodiments, an RNase H agent modulates the amount and/or activity of a target nucleic acid. The term RNase H agent excludes antisense agents that act principally through RISC/Ago2.

[0070] As used herein, “reducing” or “inhibiting” PSD3 means reducing expression of PSD3 RNA and/or protein levels in the presence of an oligomeric compound or oligomeric agent described herein compared to expression of PSD3 RNA and/or protein levels in the absence of an oligomeric compound or oligomeric agent described herein.

[0071] As used herein, “treating” means improving a subject's disease or condition by administering an oligomeric agent or oligomeric compound described herein. In certain embodiments, treating a subject improves a symptom relative to the same symptom in the absence of the treatment. In certain embodiments, treatment reduces in the severity or frequency of a symptom, or delays the onset of a symptom, slows the progression of a symptom, or slows the severity or frequency of a symptom.

[0072] As used herein, “therapeutically effective amount” means an amount of a pharmaceutical agent or composition that has been observed to provide a therapeutic benefit to an animal. For example, a therapeutically effective amount may be observed to improve a symptom of a disease.

### Certain Embodiments

[0073] Embodiment 1. An oligomeric compound comprising a modified oligonucleotide consisting of 8 to 80 linked nucleosides, wherein the nucleobase sequence of the modified oligonucleotide is at least 80% complementary to an equal length portion of a PSD3 nucleic acid, and wherein the modified oligonucleotide has at least one modification selected from a modified sugar moiety and a modified internucleoside linkage.

[0074] Embodiment 2. The oligomeric compound of embodiment 1, wherein the PSD3 nucleic acid has the nucleobase sequence of any of SEQ ID NOs: 1 or 2.

[0075] Embodiment 3. The oligomeric compound of embodiment 1 or 2, wherein the nucleobase sequence of the modified oligonucleotide is at least 80% complementary to an equal length portion within nucleobases 82205-82220, 181927-181942, 184997-185012, 217663-217678, 218081-218096, 218085-218100, 222016-222031, 222028-222043, 222044-222059, 244765-244780, 285152-285167, 285254-285269, 288678-288693, 288680-288695, 288681-288696, 291274-291289, 330574-330589, 344743-344758, or 463909-463924 of SEQ ID NO: 1.

[0076] Embodiment 4. The oligomeric compound of any of embodiments 1-3, wherein the nucleobase sequence of the modified oligonucleotide is at least 80% complementary to an equal length portion within nucleobases 629-644, 1047-1062, 1051-1066, 1426-1441, 1438-1453, 1454-1469, 1787-1802, 1889-1904, 2073-2088, 2075-2090, or 2076-2091 of SEQ ID NO: 2.

[0077] Embodiment 5. The oligomeric compound of any of embodiments 1-4, wherein the nucleobase sequence of the modified oligonucleotide is at least 80% complementary to an equal length portion within nucleobases 222044-222059, 288678-288693, or 288680-288695 of SEQ ID NO: 1.

[0078] Embodiment 6. The oligomeric compound of any of embodiments 1-5, wherein the nucleobase sequence of the modified oligonucleotide is at least 85%, at least 90%, at least 95%, or 100% complementary to an equal length portion of the PSD3 nucleic acid.

[0079] Embodiment 7. An oligomeric compound comprising a modified oligonucleotide consisting of 8 to 80 linked nucleosides and having a nucleobase sequence comprising at least 8, at least 9, at least 10, at least 11, at least 12, at least 13, at least 14, at least 15, or at least 16 contiguous nucleobases of any of the nucleobase sequences of any of SEQ ID NOs: 20-3034.

[0080] Embodiment 8. The oligomeric compound of embodiment 7, wherein the modified oligonucleotide has a nucleobase sequence comprising the nucleobase sequence of any of SEQ ID NOs: 20-3034.

[0081] Embodiment 9. The oligomeric compound of embodiment 8, wherein the modified oligonucleotide has a nucleobase sequence consisting of the nucleobase sequence of any of SEQ ID NOs: 20-3034.

[0082] Embodiment 10. The oligomeric compound of any of embodiments 7-9, wherein the modified oligonucleotide has a nucleobase sequence comprising at least 8, at least 9, at least 10, at least 11, at least 12, at least 13, at least 14, at least 15, or at least 16 contiguous nucleobases of any of the nucleobase sequences of SEQ ID NOs: 260, 355, 423, 449, 455, 461, 551, 648, 686, 781, 832, 936, 1252, 1510, 1519, 1840, 2471, 2709, or2939.

[0083] Embodiment 11. The oligomeric compound of embodiment 10, wherein the modified oligonucleotide consists of 16 to 80 linked nucleosides and has a nucleobase sequence comprising the nucleobase sequence of any of SEQ ID NOs: 260, 355, 423, 449, 455, 461, 551, 648, 686, 781, 832, 936, 1252, 1510, 1519, 1840, 2471, 2709, or 2939.

[0084] Embodiment 12. The oligomeric compound of embodiment 11, wherein the modified oligonucleotide has a nucleobase sequence consisting of the nucleobase sequence of any one of SEQ ID NOs: 260, 355, 423, 449, 455, 461, 551, 648, 686, 781, 832, 936, 1252, 1510, 1519, 1840, 2471, 2709, or 2939.

[0085] Embodiment 13. The oligomeric compound of any of embodiments 7-11, wherein the nucleobase sequence of the modified oligonucleotide is at least 85%, at least 90%, at least 95%, or 100% complementary to an equal length portion of a PSD3 nucleic acid, wherein the PSD3 nucleic acid has the nucleobase sequence of SEQ ID NOs: 1 or 2.

[0086] Embodiment 14. The oligomeric compound of any of embodiments 1-13, wherein the modified oligonucleotide consists of 10 to 25, 10 to 30, 10 to 50, 12 to 20, 12 to 25, 12 to 30, 12 to 50, 13 to 20, 13 to 25, 13 to 30, 13 to 50, 14 to 20, 14 to 25, 14 to 30, 14 to 50, 15 to 20, 15 to 25, 15 to 30, 15 to 50, 16 to 18, 16 to 20, 16 to 25, 16 to 30, 16 to 50, 17 to 20, 17 to 25, 17 to 30, 17 to 50, 18 to 20, 18 to 25, 18 to 30, 18 to 50, 19 to 20, 19 to 25, 19 to 30, 19 to 50, 20 to 25, 20 to 30, 20 to 50, 21 to 25, 21 to 30, 21 to 50, 22 to 25, 22 to 30, 22 to 50, 23 to 25, 23 to 30, or 23 to 50 linked nucleosides.

[0087] Embodiment 15. The oligomeric compound of any of embodiments 1-14, wherein at least one nucleoside of the modified oligonucleotide comprises a modified sugar moiety.

[0088] Embodiment 16. The oligomeric compound of embodiment 15, wherein the modified sugar moiety comprises a bicyclic sugar moiety.

[0089] Embodiment 17. The oligomeric compound of embodiment 16, wherein the bicyclic sugar moiety comprises a 2′-4′ bridge selected from —O—CH₂—; and —O—CH(CH₃)—.

[0090] Embodiment 18. The oligomeric compound of embodiment 15, wherein the modified sugar moiety comprises a non-bicyclic modified sugar moiety.

[0091] Embodiment 19. The oligomeric compound of embodiment 18, wherein the non-bicyclic modified sugar moiety is a 2′-MOE sugar moiety or 2′-OMe sugar moiety.

[0092] Embodiment 20. The oligomeric compound of any of embodiments 1-19, wherein at least one nucleoside of the modified oligonucleotide compound comprises a sugar surrogate.

[0093] Embodiment 21. The oligomeric compound of any of embodiments 1-20, wherein the modified oligonucleotide comprises at least one modified internucleoside linkage.

[0094] Embodiment 22. The oligomeric compound of embodiment 21, wherein at least one modified internucleoside linkage is a phosphorothioate internucleoside linkage.

[0095] Embodiment 23. The oligomeric compound of embodiment 21 or 22, wherein each internucleoside linkage is a modified internucleoside linkage.

[0096] Embodiment 24. The oligomeric compound of embodiment 24, wherein each internucleoside linkage is a phosphorothioate internucleoside linkage.

[0097] Embodiment 25. The oligomeric compound of any of embodiments 21-23, wherein at least one internucleoside linkage of the modified oligonucleotide is a phosphodiester internucleoside linkage.

[0098] Embodiment 26. The oligomeric compound of any of embodiments 1-21, wherein each internucleoside linkage of the modified oligonucleotide is independently selected from a phosphodiester or a phosphorothioate internucleoside linkage.

[0099] Embodiment 27. The oligomeric compound of any of embodiments 1-21, wherein each internucleoside linkage of the modified oligonucleotide is independently selected from a phosphodiester internucleoside linkage, a phosphorothioate internucleoside linkage, or a mesyl phosphoramidate internucleoside linkage.

[0100] Embodiment 28. The oligomeric compound of any of embodiments 1-23 or 25-27, wherein at least 10, at least 11, at least 12, at least 13, at least 14, at least 15, or at least 16 internucleoside linkages of the modified oligonucleotide are phosphorothioate internucleoside linkages.

[0101] Embodiment 29. The oligomeric compound of any of embodiments 1-28, wherein the modified oligonucleotide comprises at least one modified nucleobase.

[0102] Embodiment 30. The oligomeric compound of embodiment 29, wherein the modified nucleobase is 5-methylcytosine.

[0103] Embodiment 31. The oligomeric compound of embodiment 29, wherein each cytosine is a 5-methylcytosine.

[0104] Embodiment 32. The oligomeric compound of any of embodiments 31, wherein the modified oligonucleotide comprises a deoxy region comprising of 5-12 contiguous 2′-deoxynucleosides.

[0105] Embodiment 33. The oligomeric compound of embodiment 32, wherein the deoxy region consists of 6, 7, 8, 9, 10, or 6-10 linked nucleosides.

[0106] Embodiment 34. The oligomeric compound of embodiment 32 or 33, wherein each nucleoside of the deoxy region is a 2′-β-D-deoxynucleoside.

[0107] Embodiment 35. The oligomeric compound of embodiment 32 or 33, wherein one nucleoside of the deoxy region comprises a 2′-OMe sugar moiety.

[0108] Embodiment 36. The oligomeric compound of any of embodiments 32-35, wherein each nucleoside immediately adjacent to the deoxy region comprises a modified sugar moiety.

[0109] Embodiment 37. The oligomeric compound of any of embodiments 32-36, wherein the deoxy region is flanked on the 5′-side by a 5′-region consisting of 1-6 linked 5′-region nucleosides and on the 3′-side by a 3′-region consisting of 1-6 linked 3′-region nucleosides; wherein the 3′-most nucleoside of the 5′ external region comprises a modified sugar moiety; and the 5′-most nucleoside of the 3′ external region comprises a modified sugar moiety.

[0110] Embodiment 38. The oligomeric compound of embodiment 37, wherein each nucleoside of the 3′ external region comprises a modified sugar moiety.

[0111] Embodiment 39. The oligomeric compound of embodiment 37 or 38, wherein each nucleoside of the 5′ external region comprises a modified sugar moiety.

[0112] Embodiment 40. The oligomeric compound of embodiment 39, wherein the modified oligonucleotide has:
[0113] a 5′ external region consisting of 3 linked nucleosides;
[0114] a deoxy region consisting of 10 linked nucleosides; and
[0115] a 3′ external region consisting of 3 linked nucleosides;
   wherein each of the 5′-region nucleosides and each of the 3′-region nucleosides is a cEt nucleoside.

[0116] Embodiment 41. The oligomeric compound of embodiment 39, wherein the modified oligonucleotide has:
[0117] a 5′ external region consisting of 1-6 linked nucleosides;
[0118] a deoxy region consisting of 6-10 linked nucleosides; and
[0119] a 3′ external region consisting of 1-6 linked nucleosides;
   wherein each of the 5′ external region nucleosides and each of the 3′ external region nucleosides is a cEt nucleoside or a 2′-MOE nucleoside; and each of the deoxy region nucleosides is a 2′-β-D-deoxynucleoside.

[0120] Embodiment 42. An oligomeric compound of any of embodiments 1-32, wherein the modified oligonucleotide has a sugar motif (5′ to 3′) selected from: kkkddddddddddkkk, kkkdyddddddddkkk, kkdddddddddkekek, and kkkdddddddddkkke.

[0121] Embodiment 43. An oligomeric compound comprising a modified oligonucleotide according to the following chemical notation: AₖₛTₖₛ^{m}CₖₛT_{ds}A_{ds}T_{ds}T_{ds}G_{ds}G_{ds}A_{ds}G_{ds}A_{ds}A_{ds}GₖₛTₖₛGₖ (SEQ ID NO:3036), wherein
[0122] A=an adenine nucleobase,
[0123] ^{m}C=a 5-methyl cytosine nucleobase,
[0124] G=a guanine nucleobase,
[0125] T=a thymine nucleobase,
[0126] k=a cEt sugar moiety,
[0127] d=a 2′-β-D-deoxyribosyl sugar moiety, and
[0128] s=a phosphorothioate internucleoside linkage.

[0129] Embodiment 44. An oligomeric compound comprising a modified oligonucleotide according to the following chemical notation: AₖₛGₖₛTₖₛA_{ds}T_{ds}A_{ds}A_{ds}A_{ds}G_{ds}A_{ds}A_{ds}G_{ds}T_{ds}GₖₛTₖₛTₖ (SEQ ID NO: 3038), wherein
[0130] A=an adenine nucleobase,
[0131] ^{m}C=a 5-methyl cytosine nucleobase,
[0132] G=a guanine nucleobase,
[0133] T=a thymine nucleobase,
[0134] k=a cEt sugar moiety,
[0135] d=a 2′-β-D-deoxyribosyl sugar moiety, and
[0136] s=a phosphorothioate internucleoside linkage.

[0137] Embodiment 45. An oligomeric compound comprising a modified oligonucleotide according to the following chemical notation: ^{m}CₖₛTₖₛA_{ds}T_{ds}T_{ds}G_{ds}G_{ds}A_{ds}G_{ds}A_{ds}A_{ds}GₖₛTₑₛGₖₛTₑₛAₖ (SEQ ID NO: 3040), wherein
[0138] A=an adenine nucleobase,
[0139] ^{m}C=a 5-methyl cytosine nucleobase,
[0140] G=a guanine nucleobase,
[0141] T=a thymine nucleobase,
[0142] e=a 2′-OCH₂CH₂OCH₃ modified ribosyl sugar moiety,
[0143] k=a cEt sugar moiety,
[0144] d=a 2′-β-D-deoxyribosyl sugar moiety, and
[0145] s=a phosphorothioate internucleoside linkage.

[0146] Embodiment 46. The oligomeric compound of any of embodiments 1-45, wherein the oligomeric compound comprises a conjugate group.

[0147] Embodiment 47. The oligomeric compound of embodiment 46, wherein the conjugate group comprises a conjugate linker and a conjugate moiety.

[0148] Embodiment 48. The oligomeric compound of embodiment 46 or 47, wherein the conjugate linker consists of a single bond.

[0149] Embodiment 49. The oligomeric compound of any of embodiments 46-48, wherein the conjugate linker is cleavable.

[0150] Embodiment 50. The oligomeric compound of any of embodiments 46-49, wherein the conjugate linker comprises 1-3 linker-nucleosides.

[0151] Embodiment 51. The oligomeric compound of any of embodiments 46-49, wherein the conjugate linker is a phosphate.

[0152] Embodiment 52. The oligomeric compound of any of embodiments 46-51, wherein the conjugate group is attached to the modified oligonucleotide at the 5′-end of the modified oligonucleotide.

[0153] Embodiment 53. The oligomeric compound of any of embodiments 46-51, wherein the conjugate group is attached to the modified oligonucleotide at the 3′-end of the modified oligonucleotide.

[0154] Embodiment 54. The oligomeric compound of any of embodiments 46-53, wherein the conjugate group comprises N-acetyl galactosamine.

[0155] Embodiment 55. The oligomeric compound of embodiment 54, wherein the conjugate group has the following structure:

[chemical structure]

[0156] Embodiment 56. The oligomeric compound of any of embodiments 46-55, wherein the conjugate group comprises a cell-targeting moiety.

[0157] Embodiment 57. An oligomeric compound comprising a modified oligonucleotide and a conjugate group according to the following chemical notation: THA-GalNAc-ₒAₖₛTₖₛ^{m}CₖₛT_{ds}A_{ds}T_{ds}T_{ds}G_{ds}G_{ds}A_{ds}G_{ds}A_{ds}A_{ds}GₖₛTₖₛGₖ (SEQ ID NO: 3037), wherein
[0158] A=an adenine nucleobase,
[0159] ^{m}C=a 5-methyl cytosine nucleobase,
[0160] G=a guanine nucleobase,
[0161] T=a thymine nucleobase,
[0162] k=a cEt sugar moiety,
[0163] d=a 2′-β-D-deoxyribosyl sugar moiety,
[0164] s=a phosphorothioate internucleoside linkage, and
[0165] THA-GalNAc-₀

[chemical structure]

[0166] Embodiment 58. An oligomeric compound comprising a modified oligonucleotide and a conjugate group according to the following chemical notation: THA-GalNAc-ₒAₖₛGₖₛTₖₛA_{ds}T_{ds}A_{ds}A_{ds}A_{ds}G_{ds}A_{ds}A_{ds}G_{ds}T_{ds}GₖₛTₖₛTₖ (SEQ ID NO: 3039), wherein
[0167] A=an adenine nucleobase,
[0168] G=a guanine nucleobase,
[0169] T=a thymine nucleobase,
[0170] k=a cEt sugar moiety,
[0171] d=a 2′-β-D-deoxyribosyl sugar moiety,
[0172] s=a phosphorothioate internucleoside linkage, and
[0173] THA-GalNAc-₀=

[chemical structure]

[0174] Embodiment 59. An oligomeric compound comprising a modified oligonucleotide and a conjugate group according to the following chemical notation: THA-GalNAc-ₒ^{m}CₖₛTₖₛA_{ds}T_{ds}T_{ds}G_{ds}G_{ds}A_{ds}G_{ds}A_{ds}A_{ds}GₖₛTₑₛGₖₛTₑₛAₖ (SEQ ID NO: 3041), wherein
[0175] A=an adenine nucleobase,
[0176] ^{m}C=a 5-methyl cytosine nucleobase,
[0177] G=a guanine nucleobase,
[0178] T=a thymine nucleobase,
[0179] e=a 2′-OCH₂CH₂OCH₃ modified ribosyl sugar moiety,
[0180] k=a cEt sugar moiety
[0181] d=a 2′-β-D-deoxyribosyl sugar moiety
[0182] s=a phosphorothioate internucleoside linkage, and
[0183] THA-GalNAc-₀=

[chemical structure]

[0184] Embodiment 60. The oligomeric compound of any of embodiments 1 to 59, wherein the oligomeric compound comprises a terminal group.

[0185] Embodiment 61. The oligomeric compound of embodiment 60, wherein the terminal group is an abasic sugar moiety.

[0186] Embodiment 62. An oligomeric compound according to the following chemical structure:

[chemical structure]

or a salt thereof.

[0187] Embodiment 63. The oligomeric compound of embodiment 62, which is the sodium salt or the potassium salt.

[0188] Embodiment 64. An oligomeric compound according to the following chemical structure:

[chemical structure]

[0189] Embodiment 65. An oligomeric compound according to the following chemical structure:

[chemical structure]

or a salt thereof.

[0190] Embodiment 66. The oligomeric compound of embodiment 65, which is the sodium salt or the potassium salt.

[0191] Embodiment 67. An oligomeric compound according to the following chemical structure:

[chemical structure]

[0192] Embodiment 68. An oligomeric compound according to the following chemical structure:

[chemical structure]

or a salt thereof.

[0193] Embodiment 69. The oligomeric compound of embodiment 68, which is the sodium salt or the potassium salt.

[0194] Embodiment 70. An oligomeric compound according to the following chemical structure:

[chemical structure]

[0195] Embodiment 71. A chirally enriched population of oligomeric compounds of any of embodiments 1-70, wherein the population is enriched for modified oligonucleotides comprising at least one particular phosphorothioate internucleoside linkage having a particular stereochemical configuration.

[0196] Embodiment 72. The chirally enriched population of embodiment 71, wherein the population is enriched for modified oligonucleotides comprising at least one particular phosphorothioate internucleoside linkage having the (Sp) or (Rp) configuration.

[0197] Embodiment 73. The chirally enriched population of embodiment 71, wherein the population is enriched for modified oligonucleotides having a particular, independently selected stereochemical configuration at each phosphorothioate internucleoside linkage.

[0198] Embodiment 74. The chirally enriched population of embodiment 71, wherein the population is enriched for modified oligonucleotides having the (Rp) configuration at one particular phosphorothioate internucleoside linkage and the (Sp) configuration at each of the remaining phosphorothioate internucleoside linkages.

[0199] Embodiment 75. The chirally enriched population of embodiment 71, wherein the population is enriched for modified oligonucleotides having at least 3 contiguous phosphorothioate internucleoside linkages in the Sp, Sp, and Rp configurations, in the 5′ to 3′ direction.

[0200] Embodiment 76. A population of oligomeric compounds comprising modified oligonucleotides of any of embodiments 1-70 wherein all of the phosphorothioate internucleoside linkages of the modified oligonucleotide are stereorandom.

[0201] Embodiment 77. An oligomeric duplex, comprising a first oligomeric compound and a second oligomeric compound comprising a second modified oligonucleotide, wherein the first oligomeric compound is an oligomeric compound of any of embodiments 1-70.

[0202] Embodiment 78. The oligomeric duplex of embodiment 77, wherein the second oligomeric compound comprises a second modified oligonucleotide consisting of 8 to 80 linked nucleosides, and wherein the nucleobase sequence of the second modified oligonucleotide comprises a complementary region of at least 8 nucleobases that is at least 90% complementary to an equal length portion of the first modified oligonucleotide.

[0203] Embodiment 79. The oligomeric duplex of embodiment 77 or 78, wherein the modified oligonucleotide of the first oligomeric compound comprises a 5′-stabilized phosphate group.

[0204] Embodiment 80. The oligomeric duplex of embodiment 79, wherein the stabilized phosphate group comprises a cyclopropyl phosphonate or a vinyl phosphonate.

[0205] Embodiment 81. The oligomeric duplex of any of embodiments 77-80, wherein the modified oligonucleotide of the first oligomeric compound comprises a glycol nucleic acid (GNA) sugar surrogate.

[0206] Embodiment 82. The oligomeric duplex of any of embodiments 77-80, wherein the modified oligonucleotide of the first oligomeric compound comprises a 2′-NMA sugar moiety.

[0207] Embodiment 83. The oligomeric duplex of any of embodiments 77-82, wherein at least one nucleoside of the second modified oligonucleotide comprises a modified sugar moiety.

[0208] Embodiment 84. The oligomeric duplex of embodiment 83, wherein the modified sugar moiety of the second modified oligonucleotide comprises a bicyclic sugar moiety.

[0209] Embodiment 85. The oligomeric duplex of embodiment 84, wherein the bicyclic sugar moiety of the second modified oligonucleotide comprises a 2′-4′ bridge selected from —O—CH₂—; and —O—CH(CH₃)—.

[0210] Embodiment 86. The oligomeric duplex of embodiment 83, wherein the modified sugar moiety of the second modified oligonucleotide comprises a non-bicyclic modified sugar moiety.

[0211] Embodiment 87. The oligomeric duplex of embodiment 86, wherein the non-bicyclic modified sugar moiety of the second modified oligonucleotide is a 2′-MOE sugar moiety, a 2′-F sugar moiety, or 2′-OMe sugar moiety.

[0212] Embodiment 88. The oligomeric duplex of any of embodiments 77-87, wherein at least one nucleoside of the second modified oligonucleotide comprises a sugar surrogate.

[0213] Embodiment 89. The oligomeric duplex of any of embodiments 77-88, wherein at least one internucleoside linkage of the second modified oligonucleotide is a modified internucleoside linkage.

[0214] Embodiment 90. The oligomeric duplex of embodiment 89, wherein at least one modified internucleoside linkage of the second modified oligonucleotide is a phosphorothioate internucleoside linkage.

[0215] Embodiment 91. The oligomeric duplex of embodiment 89 or 90, wherein at least one modified internucleoside linkage of the second modified oligonucleotide is a mesyl phosphoramidate internucleoside linkage.

[0216] Embodiment 92. The oligomeric duplex of any of embodiments 77-91, wherein at least one internucleoside linkage of the second modified oligonucleotide is a phosphodiester internucleoside linkage.

[0217] Embodiment 93. The oligomeric duplex of any of embodiments 77-90 or 92, wherein each internucleoside linkage of the second modified oligonucleotide is independently selected from a phosphodiester or a phosphorothioate internucleoside linkage.

[0218] Embodiment 94. The oligomeric duplex of any of embodiments 77-92, wherein each internucleoside linkage of the second modified oligonucleotide is independently selected from a phosphodiester internucleoside linkage, a phosphorothioate internucleoside linkage, or a mesyl phosphoramidate internucleoside linkage.

[0219] Embodiment 95. The oligomeric duplex of any of embodiments 77-94, wherein the second modified oligonucleotide comprises at least one modified nucleobase.

[0220] Embodiment 96. The oligomeric duplex of embodiment 95, wherein the modified nucleobase of the second modified oligonucleotide is 5-methylcytosine.

[0221] Embodiment 97. The oligomeric duplex of any of embodiments 77-96, wherein the second modified oligonucleotide comprises a conjugate group.

[0222] Embodiment 98. The oligomeric duplex of embodiment 97, wherein the conjugate group comprises a conjugate linker and a conjugate moiety.

[0223] Embodiment 99. The oligomeric duplex of embodiment 97 or 98, wherein the conjugate group is attached to the second modified oligonucleotide at the 5′-end of the second modified oligonucleotide.

[0224] Embodiment 100. The oligomeric duplex of embodiment 97 or 98, wherein the conjugate group is attached to the second modified oligonucleotide at the 3′-end of the modified oligonucleotide.

[0225] Embodiment 101. The oligomeric duplex of any of embodiments 97-100, wherein the conjugate group comprises N-acetyl galactosamine.

[0226] Embodiment 102. The oligomeric duplex of any of embodiments 97-101, wherein the second modified oligonucleotide comprises a terminal group.

[0227] Embodiment 103. The oligomeric duplex of embodiment 102, wherein the terminal group is an abasic sugar moiety.

[0228] Embodiment 104. The oligomeric duplex of any of embodiments 77-103, wherein the second modified oligonucleotide consists of 10 to 25, 10 to 30, 10 to 50, 12 to 20, 12 to 25, 12 to 30, 12 to 50, 13 to 20, 13 to 25, 13 to 30, 13 to 50, 14 to 20, 14 to 25, 14 to 30, 14 to 50, 15 to 20, 15 to 25, 15 to 30, 15 to 50, 16 to 18, 16 to 20, 16 to 25, 16 to 30, 16 to 50, 17 to 20, 17 to 25, 17 to 30, 17 to 50, 18 to 20, 18 to 25, 18 to 30, 18 to 50, 19 to 20, 19 to 25, 19 to 30, 19 to 50, 20 to 25, 20 to 30, 20 to 50, 21 to 25, 21 to 30, 21 to 50, 22 to 25, 22 to 30, 22 to 50, 23 to 25, 23 to 30, or 23 to 50 linked nucleosides.

[0229] Embodiment 105. An antisense agent comprising an antisense compound, wherein the antisense compound is the oligomeric compound of any of embodiments 1-70.

[0230] Embodiment 106. The antisense agent of embodiment 105, wherein the antisense agent is the oligomeric duplex of any of embodiments 77-104.

[0231] Embodiment 107. The antisense agent of embodiment 105 or 106, wherein the antisense agent is:
[0232] i. an RNase H agent capable of reducing the amount of PSD3 nucleic acid through the activation of RNase H; or
[0233] ii. an RNAi agent capable of reducing the amount of PSD3 nucleic acid through the activation of RISC/Ago2.

[0234] Embodiment 108. The antisense agent of any of embodiments 105-107, wherein the conjugate group is a cell-targeting moiety.

[0235] Embodiment 109. A pharmaceutical composition comprising the oligomeric compound of any of embodiments 1-70, the population of any of embodiments 71-76, the oligomeric duplex of any of embodiments 77-104, or the antisense agent of any of embodiments 105-108, and a pharmaceutically acceptable diluent or carrier.

[0236] Embodiment 110. The pharmaceutical composition of embodiment 109, wherein the pharmaceutically acceptable diluent is water or phosphate-buffered saline.

[0237] Embodiment 111. The pharmaceutical composition of embodiment 110, wherein the pharmaceutical composition consists essentially of the oligomeric compound, the modified oligonucleotide, the oligomeric duplex, or the antisense agent, and water or phosphate-buffered saline.

[0238] Embodiment 112. A method comprising administering to a subject the oligomeric compound of any of embodiments 1-70, the population of any of embodiments 71-76, the oligomeric duplex of any of embodiments 77-104, the antisense agent of any of embodiments 105-108, or the pharmaceutical composition of any of embodiments 109-111.

[0239] Embodiment 113. A method of treating a disease associated with PSD3 comprising administering to a subject having a disease associated with PSD3 a therapeutically effective amount of the oligomeric compound of any of embodiments 1-70, the population of any of embodiments 71-76, the oligomeric duplex of any of embodiments 77-104, the antisense agent of any of embodiments 105-108, or the pharmaceutical composition of any of embodiments 109-111; thereby treating the disease associated with PSD3.

[0240] Embodiment 114. The method of embodiment 113, wherein the disease associated with PSD3 is liver disease, fatty liver disease (FLD), nonalcoholic fatty liver disease (NAFLD), hepatic steatosis, non-alcoholic steatohepatitis (NASH), liver cirrhosis, hepatocellular carcinoma, alcoholic liver disease, alcoholic steatohepatitis (ASH), HCV hepatitis, chronic hepatitis, hereditary hemochromatosis, or primary sclerosing cholangitis.

[0241] Embodiment 115. The method of embodiment 114, wherein administering the oligomeric compound of any of embodiments 1-70, the population of any of embodiments 71-76, the oligomeric duplex of any of embodiments 77-104, the antisense agent of any of embodiments 105-108, or the pharmaceutical composition of any of embodiments 109-111 reduces liver damage, steatosis, liver fibrosis, liver inflammation, liver scarring or cirrhosis, liver failure, liver enlargement, elevated transaminases, or hepatic fat accumulation in the subject.

[0242] Embodiment 116. A method of reducing expression of PSD3 in a cell comprising contacting the cell with the oligomeric compound of any of embodiments 1-70, the population of any of embodiments 71-76, the oligomeric duplex of any of embodiments 77-104, the antisense agent of any of embodiments 105-108, or the pharmaceutical composition of any of embodiments 109-111.

[0243] Embodiment 117. The method of embodiment 116, wherein the cell is a liver cell.

[0244] Embodiment 118. Use of the oligomeric compound of any of embodiments 1-70, the population of any of embodiments 71-76, the oligomeric duplex of any of embodiments 77-104, the antisense agent of any of embodiments 105-108, or the pharmaceutical composition of any of embodiments 109-111 for treating a disease associated with PSD3.

[0245] Embodiment 119. Use of the oligomeric compound of any of embodiments 1-70, the population of any of embodiments 71-76, the oligomeric duplex of any of embodiments 77-104, the antisense agent of any of embodiments 105-108, or the pharmaceutical composition of any of embodiments 109-111 in the manufacture of a medicament for treating a disease associated with PSD3.

[0246] Embodiment 120. The use of embodiment 118 or 119, wherein the disease associated with PSD3 is liver disease, fatty liver disease (FLD), nonalcoholic fatty liver disease (NAFLD), hepatic steatosis, non-alcoholic steatohepatitis (NASH), liver cirrhosis, hepatocellular carcinoma, alcoholic liver disease, alcoholic steatohepatitis (ASH), HCV hepatitis, chronic hepatitis, hereditary hemochromatosis, or primary sclerosing cholangitis.

### Certain Oligomeric Duplexes

[0247] Certain embodiments are directed to oligomeric duplexes comprising a first oligomeric compound and a second oligomeric compound.

[0248] In certain embodiments, an oligomeric duplex comprises:
[0249] a first oligomeric compound comprising a first modified oligonucleotide consisting of 8 to 80 linked nucleosides, wherein the nucleobase sequence of the first modified oligonucleotide is at least 80% complementary to an equal length portion within nucleobases 82205-82220, 181927-181942, 184997-185012, 217663-217678, 218081-218096, 218085-218100, 222016-222031, 222028-222043, 222044-222059, 244765-244780, 285152-285167, 285254-285269, 288678-288693, 288680-288695, 288681-288696, 291274-291289, 330574-330589, 344743-344758, or 463909-463924 of SEQ ID NO: 1; and
[0250] a second oligomeric compound comprising a second modified oligonucleotide consisting of 8 to 80 linked nucleosides wherein the nucleobase sequence of the second modified oligonucleotide comprises a complementary region of at least 8 nucleobases that is at least 90% complementary to an equal length portion of the first modified oligonucleotide.

[0251] In certain embodiments, an oligomeric duplex comprises:
[0252] a first oligomeric compound comprising a first modified oligonucleotide consisting of 8 to 80 linked nucleosides wherein the nucleobase sequence of the first modified oligonucleotide comprises at least 8, at least 9, at least 10, at least 11, at least 12, at least 13, at least 14, at least 15, or at least 16 contiguous nucleobases of the nucleobase sequence of any of SEQ ID NOs 20-3034, wherein each thymine is replaced by uracil; and
[0253] a second oligomeric compound comprising a second modified oligonucleotide consisting of 8 to 80 linked nucleosides wherein the nucleobase sequence of the second modified oligonucleotide comprises a complementary region of at least 8 nucleobases that is at least 90% complementary to an equal length portion of the first modified oligonucleotide.

[0254] In certain embodiments, the first oligomeric compound is an antisense compound. In certain embodiments, the first modified oligonucleotide is an antisense oligonucleotide. In certain embodiments, the second oligomeric compound is a sense compound. In certain embodiments, the second modified oligonucleotide is a sense oligonucleotide.

[0255] In certain embodiments, an oligomeric duplex comprises:
[0256] a first oligomeric compound comprising a first modified oligonucleotide consisting of 16 to 80 linked nucleosides wherein the nucleobase sequence of the first modified oligonucleotide comprises the nucleobase sequence of any of SEQ ID NOs 20-3034, wherein each thymine is replaced by uracil; and
[0257] a second oligomeric compound comprising a second modified oligonucleotide consisting of 16 to 80 linked nucleosides wherein the nucleobase sequence of the second modified oligonucleotide comprises a complementary region of at least 16 nucleobases that is at least 90% complementary to an equal length portion of the first modified oligonucleotide.

[0258] In certain embodiments, the first oligomeric compound is an antisense compound. In certain embodiments, the first modified oligonucleotide is an antisense oligonucleotide. In certain embodiments, the second oligomeric compound is a sense compound. In certain embodiments, the second modified oligonucleotide is a sense oligonucleotide.

[0259] In any of the oligomeric duplexes described herein, at least one nucleoside of the first modified oligonucleotide and/or the second modified oligonucleotide can comprise a modified sugar moiety. Examples of suitable modified sugar moieties include, but are not limited to, a bicyclic sugar moiety, such as a 2′-4′ bridge selected from —O—CH₂—; and —O—CH(CH₃)—, and a non-bicyclic sugar moiety, such as a 2′-MOE sugar moiety, a 2′-F sugar moiety, a 2′-OMe sugar moiety, or a 2′-NMA sugar moiety. In certain embodiments, at least 80%, at least 90%, or 100% of the nucleosides of the first modified oligonucleotide and/or the second modified oligonucleotide comprises a modified sugar moiety selected from 2′-F and 2′-OMe.

[0260] In any of the oligomeric duplexes described herein, at least one nucleoside of the first modified oligonucleotide and/or the second modified oligonucleotide can comprise a sugar surrogate. Examples of suitable sugar surrogates include, but are not limited to, morpholino, peptide nucleic acid (PNA), glycol nucleic acid (GNA), and unlocked nucleic acid (UNA). In certain embodiments, at least one nucleoside of the first modified oligonucleotide comprises a sugar surrogate, which can be a GNA.

[0261] In any of the oligomeric duplexes described herein, at least one internucleoside linkage of the first modified oligonucleotide and/or the second modified oligonucleotide can comprise a modified internucleoside linkage. In certain embodiments, the modified internucleoside linkage is a phosphorothioate internucleoside linkage. In certain embodiments, at least one of the first, second, or third internucleoside linkages from the 5′ end and/or the 3′ end of the first modified oligonucleotide comprises a phosphorothioate linkage. In certain embodiments, at least one of the first, second, or third internucleoside linkages from the 5′ end and/or the 3′ end of the second modified oligonucleotide comprises a phosphorothioate linkage.

[0262] In any of the oligomeric duplexes described herein, at least one internucleoside linkage of the first modified oligonucleotide and/or the second modified oligonucleotide can comprise a phosphodiester internucleoside linkage.

[0263] In any of the oligomeric duplexes described herein, each internucleoside linkage of the first modified oligonucleotide and/or the second modified oligonucleotide can be independently selected from a phosphodiester or a phosphorothioate internucleoside linkage.

[0264] In any of the oligomeric duplexes described herein, at least one nucleobase of the first modified oligonucleotide and/or the second modified oligonucleotide can be modified nucleobase. In certain embodiments, the modified nucleobase is 5-methylcytosine.

[0265] In any of the oligomeric duplexes described herein, the first modified oligonucleotide can comprise a stabilized phosphate group attached to the 5′ position of the 5′-most nucleoside. In certain embodiments, the stabilized phosphate group comprises a cyclopropyl phosphonate or an (E)-vinyl phosphonate.

[0266] In any of the oligomeric duplexes described herein, the first modified oligonucleotide can comprise a conjugate group. In certain embodiments, the conjugate group comprises a conjugate linker and a conjugate moiety. In certain embodiments, the conjugate group is attached to the first modified oligonucleotide at the 5′-end of the first modified oligonucleotide. In certain embodiments, the conjugate group is attached to the first modified oligonucleotide at the 3′-end of the modified oligonucleotide. In certain embodiments, the conjugate group comprises N-acetyl galactosamine. In certain embodiments, the conjugate group comprises a cell-targeting moiety having an affinity for transferrin receptor (TfR), also known as TfR1 and CD71. In certain embodiments, the conjugate group comprises an anti-TfR1 antibody or fragment thereof. In certain embodiments, the conjugate group comprises a protein or peptide capable of binding TfR1. In certain embodiments, the conjugate group comprises an aptamer capable of binding TfR1. In certain embodiments, conjugate groups may be selected from any of a C22 alkyl, C20 alkyl, C16 alkyl, C10 alkyl, C21 alkyl, C19 alkyl, C18 alkyl, C15 alkyl, C14 alkyl, C13 alkyl, C12 alkyl, C11 alkyl, C9 alkyl, C8 alkyl, C7 alkyl, C6 alkyl, C5 alkyl, C22 alkenyl, C20 alkenyl, C16 alkenyl, C10 alkenyl, C21 alkenyl, C19 alkenyl, C18 alkenyl, C15 alkenyl, C14 alkenyl, C13 alkenyl, C12 alkenyl, C11 alkenyl, C9 alkenyl, C8 alkenyl, C7 alkenyl, C6 alkenyl, or C5 alkenyl. In certain embodiments, conjugate groups may be selected from any of C22 alkyl, C20 alkyl, C16 alkyl, C10 alkyl, C21 alkyl, C19 alkyl, C18 alkyl, C15 alkyl, C14 alkyl, C13 alkyl, C12 alkyl, C11 alkyl, C9 alkyl, C8 alkyl, C7 alkyl, C6 alkyl, and C5 alkyl, where the alkyl chain has one or more unsaturated bonds.

[0267] In any of the oligomeric duplexes described herein, the second modified oligonucleotide can comprise a conjugate group. In certain embodiments, the conjugate group comprises a conjugate linker and a conjugate moiety. In certain embodiments, the conjugate group is attached to the second modified oligonucleotide at the 5′-end of the second modified oligonucleotide. In certain embodiments, the conjugate group is attached to the second modified oligonucleotide at the 3′-end of the modified oligonucleotide. In certain embodiments, the conjugate group comprises N-acetyl galactosamine. In certain embodiments, the conjugate group comprises a cell-targeting moiety having an affinity for transferrin receptor (TfR), also known as TfR1 and CD71. In certain embodiments, the conjugate group comprises an anti-TfR1 antibody or fragment thereof. In certain embodiments, the conjugate group comprises a protein or peptide capable of binding TfR1. In certain embodiments, the conjugate group comprises an aptamer capable of binding TfR1. In certain embodiments, conjugate groups may be selected from any of a C22 alkyl, C20 alkyl, C16 alkyl, C10 alkyl, C21 alkyl, C19 alkyl, C18 alkyl, C15 alkyl, C14 alkyl, C13 alkyl, C12 alkyl, C11 alkyl, C9 alkyl, C8 alkyl, C7 alkyl, C6 alkyl, C5 alkyl, C22 alkenyl, C20 alkenyl, C16 alkenyl, C10 alkenyl, C21 alkenyl, C19 alkenyl, C18 alkenyl, C15 alkenyl, C14 alkenyl, C13 alkenyl, C12 alkenyl, C11 alkenyl, C9 alkenyl, C8 alkenyl, C7 alkenyl, C6 alkenyl, or C5 alkenyl. In certain embodiments, conjugate groups may be selected from any of C22 alkyl, C20 alkyl, C16 alkyl, C10 alkyl, C21 alkyl, C19 alkyl, C18 alkyl, C15 alkyl, C14 alkyl, C13 alkyl, C12 alkyl, C11 alkyl, C9 alkyl, C8 alkyl, C7 alkyl, C6 alkyl, and C5 alkyl, where the alkyl chain has one or more unsaturated bonds.

[0268] In certain embodiments, an antisense agent comprises an antisense compound, which comprises an oligomeric compound or an oligomeric duplex described herein. In certain embodiments, an antisense agent, which can comprise an oligomeric compound or an oligomeric duplex described herein, is an RNAi agent capable of reducing the amount of PSD3 nucleic acid through the activation of RISC/Ago2.

[0269] Certain embodiments provide an oligomeric agent comprising two or more oligomeric duplexes. In certain embodiments, an oligomeric agent comprises two or more of any of the oligomeric duplexes described herein. In certain embodiments, an oligomeric agent comprises two or more of the same oligomeric duplex, which can be any of the oligomeric duplexes described herein. In certain embodiments, the two or more oligomeric duplexes are linked together. In certain embodiments, the two or more oligomeric duplexes are covalently linked together. In certain embodiments, the second modified oligonucleotides of two or more oligomeric duplexes are covalently linked together. In certain embodiments, the second modified oligonucleotides of two or more oligomeric duplexes are covalently linked together at their 3′ ends. In certain embodiments, the two or more oligomeric duplexes are covalently linked together by a glycol linker, such as a tetraethylene glycol linker. Certain such compounds are described in, e.g., Alterman, et al., Nature Biotech., 37:844-894, 2019.

### I. Certain Oligonucleotides

[0270] In certain embodiments, provided herein are oligomeric compounds comprising oligonucleotides, which consist of linked nucleosides. Oligonucleotides may be unmodified oligonucleotides (RNA or DNA) or may be modified oligonucleotides. Modified oligonucleotides comprise at least one modification relative to unmodified RNA or DNA. That is, modified oligonucleotides comprise at least one modified nucleoside (comprising a modified sugar moiety and/or a modified nucleobase) and/or at least one modified internucleoside linkage. Certain modified nucleosides and modified internucleoside linkages suitable for use in modified oligonucleotides are described below.

[0271] A. Certain Modified Nucleosides

[0272] Modified nucleosides comprise a modified sugar moiety or a modified nucleobase or both a modified sugar moiety and a modified nucleobase. In certain embodiments, modified nucleosides comprising the following modified sugar moieties and/or the following modified nucleobases may be incorporated into modified oligonucleotides.

[0273] 1. Certain Sugar Moieties

[0274] In certain embodiments, modified sugar moieties are non-bicyclic modified sugar moieties. In certain embodiments, modified sugar moieties are bicyclic or tricyclic sugar moieties. In certain embodiments, modified sugar moieties are sugar surrogates. Such sugar surrogates may comprise one or more substitutions corresponding to those of other types of modified sugar moieties.

In certain embodiments, modified sugar moieties are non-bicyclic modified sugar moieties comprising a furanosyl ring with one or more substituent groups none of which bridges two atoms of the furanosyl ring to form a bicyclic structure. Such non bridging substituents may be at any position of the furanosyl, including but not limited to substituents at the 2′, 3′, 4′, and/or 5′ positions. In certain embodiments one or more non-bridging substituent of non-bicyclic modified sugar moieties is branched. Examples of 2′-substituent groups suitable for non-bicyclic modified sugar moieties include but are not limited to: 2′-F, 2′-OCH₃ (“OMe” or “O-methyl”), and 2′-O(CH₂)₂OCH₃ (“MOE” or “O-methoxyethyl”). In certain embodiments, 2′-substituent groups are selected from among: halo, allyl, amino, azido, SH, CN, OCN, CF₃, OCF₃, O—C₁-C₁₀ alkoxy, O—C₁-C₁₀ substituted alkoxy, O—C₁-C₁₀ alkyl, O—C₁-C₁₀ substituted alkyl, S-alkyl, N(Rₘ)-alkyl, O-alkenyl, S-alkenyl, N(Rₘ)-alkenyl, O-alkynyl, S-alkynyl, N(Rₘ)-alkynyl, O-alkylenyl-O-alkyl, alkynyl, alkaryl, aralkyl, O-alkaryl, O-aralkyl, O(CH₂)₂SCH₃, O(CH₂)₂ON(Rₘ)(Rₙ) or OCH₂C(═O)—N(Rₘ)(Rₙ), where each Rₘ and Rₙ is, independently, H, an amino protecting group, or substituted or unsubstituted C₁-C₁₀ alkyl, —O(CH2)2ON(CH3)2 (“DMAOE”), 2′-OCH2OCH2N(CH2)2 (“DMAEOE”), and the 2′-substituent groups described in Cook et al., U.S. Pat. No. 6,531,584; Cook et al., U.S. Pat. No. 5,859,221; and Cook et al., U.S. Pat. No. 6,005,087. Certain embodiments of these 2′-substituent groups can be further substituted with one or more substituent groups independently selected from among: hydroxyl, amino, alkoxy, carboxy, benzyl, phenyl, nitro (NO₂), thiol, thioalkoxy, thioalkyl, halogen, alkyl, aryl, alkenyl and alkynyl. In certain embodiments, non-bicyclic modified sugar moieties comprise a substituent group at the 3′-position. Examples of substituent groups suitable for the 3′-position of modified sugar moieties include but are not limited to alkoxy (e.g., methoxy), alkyl (e.g., methyl, ethyl). In certain embodiments, non-bicyclic modified sugar moieties comprise a substituent group at the 4′-position. Examples of 4′-substituent groups suitable for non-bicyclic modified sugar moieties include but are not limited to alkoxy (e.g., methoxy), alkyl, and those described in Manoharan et al., WO 2015/106128. Examples of 5′-substituent groups suitable for non-bicyclic modified sugar moieties include but are not limited to: 5′-methyl (R or S), 5′-vinyl, ethyl, and 5′-methoxy. In certain embodiments, non-bicyclic modified sugar moieties comprise more than one non-bridging sugar substituent, for example, 2′-F-5′-methyl sugar moieties and the modified sugar moieties and modified nucleosides described in Migawa et al., WO 2008/101157 and Rajeev et al., US2013/0203836).

[0275] In certain embodiments, a 2′-substituted non-bicyclic modified nucleoside comprises a sugar moiety comprising a non-bridging 2′-substituent group selected from: F, NH₂, N₃, OCF₃, OCH₃, O(CH₂)₃NI-₂, CH₂CH═CH₂, OCH₂CH═CH₂, OCH₂CH₂OCH₃, O(CH₂)₂SCH₃, O(CH₂)₂ON(Rₘ)(Rₙ), O(CH₂)₂O(CH₂)₂N(CH₃)₂, and N-substituted acetamide (OCH₂C(═O)—N(Rₘ)(Rₙ)), where each Rₘ and Rₙ is, independently, H, an amino protecting group, or substituted or unsubstituted C₁-C₁₀ alkyl.

[0276] In certain embodiments, a 2′-substituted nucleoside non-bicyclic modified nucleoside comprises a sugar moiety comprising a non-bridging 2′-substituent group selected from: F, OCF₃, OCH₃, OCH₂CH₂OCH₃, O(CH₂)₂SCH₃, O(CH₂)₂ON(CH₃)₂, O(CH₂)₂O(CH₂)₂N(CH₃)₂, O(CH₂)₂ON(CH₃)₂ (“DMAOE”), OCH₂OCH₂N(CH₂)₂ (“DMAEOE”) and OCH₂C(═O)—N(H)CH₃ (“NMA”).

[0277] In certain embodiments, a 2′-substituted non-bicyclic modified nucleoside comprises a sugar moiety comprising a non-bridging 2′-substituent group selected from: F, OCH₃, and OCH₂CH₂OCH₃.

[0278] In certain embodiments, modified furanosyl sugar moieties and nucleosides incorporating such modified furanosyl sugar moieties are further defined by isomeric configuration. For example, a 2′-deoxyfuranosyl sugar moiety may be in seven isomeric configurations other than the naturally occurring β-D-deoxyribosyl configuration. Such modified sugar moieties are described in, e.g., WO 2019/157531, incorporated by reference herein. A 2′-modified sugar moiety has an additional stereocenter at the 2′-position relative to a 2′-deoxyfuranosyl sugar moiety; therefore, such sugar moieties have a total of sixteen possible isomeric configurations. 2′-modified sugar moieties described herein are in the β-D-ribosyl isomeric configuration unless otherwise specified.

[0279] In naturally occurring nucleic acids, sugars are linked to one another 3′ to 5′. In certain embodiments, oligonucleotides include one or more nucleoside or sugar moiety linked at an alternative position, for example at the 2′ or inverted 5′ to 3′. For example, where the linkage is at the 2′ position, the 2′-substituent groups may instead be at the 3′-position.

[0280] Certain modified sugar moieties comprise a substituent that bridges two atoms of the furanosyl ring to form a second ring, resulting in a bicyclic sugar moiety. Nucleosides comprising such bicyclic sugar moieties have been referred to as bicyclic nucleosides (BNAs), locked nucleosides, or conformationally restricted nucleotides (CRN). Certain such compounds are described in US Patent Publication No. 2013/0190383; and PCT publication WO 2013/036868. In certain such embodiments, the bicyclic sugar moiety comprises a bridge between the 4′ and the 2′ furanose ring atoms. In certain such embodiments, the furanose ring is a ribose ring. Examples of such 4′ to 2′ bridging sugar substituents include but are not limited to: 4′-CH₂-2′, 4′—(CH₂)₂-2′, 4′—(CH₂)₃-2′, 4′-CH₂—O-2′ (“LNA”), 4′-CH₂—S-2′, 4′—(CH₂)₂—O-2′ (“ENA”), 4′-CH(CH₃)—O-2′ (referred to as “constrained ethyl” or “cEt” when in the S configuration), 4′-CH₂—O—CH₂-2′, 4′-CH₂—N(R)-2′, 4′-CH(CH₂OCH₃)—O-2′ (“constrained MOE” or “cMOE”) and analogs thereof (see, e.g., Seth et al., U.S. Pat. No. 7,399,845, Bhat et al., U.S. Pat. No. 7,569,686, Swayze et al., U.S. Pat. No. 7,741,457, and Swayze et al., U.S. Pat. No. 8,022,193), 4′-C(CH₃)(CH₃)—O-2′ and analogs thereof (see, e.g., Seth et al., U.S. Pat. No. 8,278,283), 4′-CH₂—N(OCH₃)-2′ and analogs thereof (see, e.g., Prakash et al., U.S. Pat. No. 8,278,425), 4′-CH₂—O—N(CH₃)-2′ (see, e.g., Allerson et al., U.S. Pat. No. 7,696,345 and Allerson et al., U.S. Pat. No. 8,124,745), 4′-CH₂—C(H)(CH₃)-2′ (see, e.g., Zhou, et al., J. Org. Chem., 2009, 74, 118-134), 4′-CH₂—C(═CH₂)-2′ and analogs thereof (see e.g., Seth et al., U.S. Pat. No. 8,278,426), 4′-C(RₐR_{b})—N(R)—O-2′, 4′—C(RₐR_{b})—O—N(R)-2′, 4′-CH₂—O—N(R)-2′, and 4′- CH₂—N(R)—O-2′, wherein each R, Rₐ, and R_{b} is, independently, H, a protecting group, or C₁-C₁₂ alkyl (see, e.g. Imanishi et al., U.S. Pat. No. 7,427,672).

[0281] In certain embodiments, such 4′ to 2′ bridges independently comprise from 1 to 4 linked groups independently selected from: —[C(Ra)(Rb)]n-, —[C(Ra)(Rb)]n-O—, C(Ra)═C(Rb)—, C(Ra)=N—, C(═NRa)—, —C(═O)—, —C(═S)—, —O—, —Si(Ra)2-, —S(═O)x-, and N(Ra)-;

[0282] wherein:

[0283] x is 0, 1, or 2;

[0284] n is 1, 2, 3, or 4;

[0285] each Ra and Rb is, independently, H, a protecting group, hydroxyl, C1-C12 alkyl, substituted C1-C12 alkyl, C2-C12 alkenyl, substituted C2-C12 alkenyl, C2-C12 alkynyl, substituted C2-C12 alkynyl, C5-C20 aryl, substituted C5-C20 aryl, heterocycle radical, substituted heterocycle radical, heteroaryl, substituted heteroaryl, C5-C7 alicyclic radical, substituted C5-C7 alicyclic radical, halogen, OJ1, NJ1J2, SJ1, N3, COOJ1, acyl (C(═O)—H), substituted acyl, CN, sulfonyl (S(═O)2-J1), or sulfoxyl (S(═O)-J1); and each J1 and J2 is, independently, H, C1-C12 alkyl, substituted C1-C12 alkyl, C2-C12 alkenyl, substituted C2-C12 alkenyl, C2-C12 alkynyl, substituted C2-C12 alkynyl, C5-C20 aryl, substituted C5-C20 aryl, acyl (C(═O)—H), substituted acyl, a heterocycle radical, a substituted heterocycle radical, C1-C12 aminoalkyl, substituted C1-C12 aminoalkyl, or a protecting group.

[0286] Additional bicyclic sugar moieties are known in the art, see, for example: Freier et al., Nucleic Acids Research, 1997, 25(22), 4429-4443, Albaek et al., J. Org. Chem., 2006, 71, 7731-7740, Singh et al., Chem. Commun., 1998, 4, 455-456; Koshkin et al., Tetrahedron, 1998, 54, 3607-3630; Wahlestedt et al., Proc. Natl. Acad. Sci. U.S.A, 2000, 97, 5633-5638; Kumar et al., Bioorg. Med. Chem. Lett., 1998, 8, 2219-2222; Singh et al., J. Org. Chem., 1998, 63, 10035-10039; Srivastava et al., J. Am. Chem. Soc., 2007, 129, 8362-8379; Elayadi et al., Curr. Opinion Invens. Drugs, 2001, 2, 558-561; Braasch et al., Chem. Biol., 2001, 8, 1-7; Orum et al., Curr. Opinion Mol. Ther., 2001, 3, 239-243; Wengel et al., U.S. Pat. No. 7,053,207, Imanishi et al., U.S. Pat. No. 6,268,490, Imanishi et al. U.S. Pat. No. 6,770,748, Imanishi et al., U.S. RE44,779; Wengel et al., U.S. Pat. No. 6,794,499, Wengel et al., U.S. Pat. No. 6,670,461; Wengel et al., U.S. Pat. No. 7,034,133, Wengel et al., U.S. Pat. No. 8,080,644; Wengel et al., U.S. Pat. No. 8,034,909; Wengel et al., U.S. Pat. No. 8,153,365; Wengel et al., U.S. Pat. No. 7,572,582; and Ramasamy et al., U.S. Pat. No. 6,525,191, Torsten et al., WO 2004/106356, Wengel et al., WO 1999/014226; Seth et al., WO 2007/134181; Seth et al., U.S. Pat. No. 7,547,684; Seth et al., U.S. Pat. No. 7,666,854; Seth et al., U.S. Pat. No. 8,088,746; Seth et al., U.S. Pat. No. 7,750,131; Seth et al., U.S. Pat. No. 8,030,467; Seth et al., U.S. Pat. No. 8,268,980; Seth et al., U.S. Pat. No. 8,546,556; Seth et al., U.S. Pat. No. 8,530,640; Migawa et al., U.S. Pat. No. 9,012,421; Seth et al., U.S. Pat. No. 8,501,805; Allerson et al., US2008/0039618; and Migawa et al., US2015/0191727.

[0287] In certain embodiments, bicyclic sugar moieties and nucleosides incorporating such bicyclic sugar moieties are further defined by isomeric configuration. For example, an LNA nucleoside (described herein) may be in the α-L configuration or in the β-D configuration.

[chemical structure]

[0288] α-L-methyleneoxy (4′-CH₂—O-2′) or α-L-LNA bicyclic nucleosides have been incorporated into oligonucleotides that showed antisense activity (Frieden et al., Nucleic Acids Research, 2003, 21, 6365-6372). The addition of locked nucleic acids to siRNAs has been shown to increase siRNA stability in serum, and to reduce off-target effects (Elmen, J. et al., (2005) Nucleic Acids Research 33(1):439-447; Mook, O R. et al., (2007) Mal Cane Ther 6(3):833-843; Grunweller, A. et al., (2003) Nucleic Acids Research 31(12):3185-3193). Herein, general descriptions of bicyclic nucleosides include both isomeric configurations. When the positions of specific bicyclic nucleosides (e.g., LNA or cEt) are identified in exemplified embodiments herein, they are in the β-D configuration, unless otherwise specified.

[0289] In certain embodiments, modified sugar moieties comprise one or more non-bridging sugar substituent and one or more bridging sugar substituent (e.g., 5′-substituted and 4′-2′ bridged sugars).

[0290] In certain embodiments, modified sugar moieties are sugar surrogates. In certain such embodiments, the oxygen atom of the sugar moiety is replaced, e.g., with a sulfur, carbon or nitrogen atom. In certain such embodiments, such modified sugar moieties also comprise bridging and/or non-bridging substituents as described herein. For example, certain sugar surrogates comprise a 4′-sulfur atom and a substitution at the 2′-position (see, e.g., Bhat et al., U.S. Pat. No. 7,875,733 and Bhat et al., U.S. Pat. No. 7,939,677) and/or the 5′ position.

[0291] In certain embodiments, sugar surrogates comprise rings having other than 5 atoms. For example, in certain embodiments, a sugar surrogate comprises a six-membered tetrahydropyran (“THP”). Such tetrahydropyrans may be further modified or substituted. Nucleosides comprising such modified tetrahydropyrans include but are not limited to hexitol nucleic acid (“HNA”), anitol nucleic acid (“ANA”), manitol nucleic acid (“MNA”) (see, e.g., Leumann, C J. Bioorg. & Med. Chem. 2002, 10, 841-854), fluoro HNA:

[chemical structure]

(“F-HNA”, see e.g. Swayze et al., U.S. Pat. No. 8,088,904; Swayze et al., U.S. Pat. No. 8,440,803; Swayze et al., U.S. Pat. No. 8,796,437; and Swayze et al., U.S. Pat. No. 9,005,906; F-HNA can also be referred to as a F-THP or 3′-fluoro tetrahydropyran), and nucleosides comprising additional modified THP compounds having the formula:

[chemical structure]

[0292] wherein, independently, for each of said modified THP nucleoside:
[0293] Bx is a nucleobase moiety;
[0294] T₃ and T₄ are each, independently, an internucleoside linking group linking the modified THP nucleoside to the remainder of an oligonucleotide or one of T₃ and T₄ is an internucleoside linking group linking the modified THP nucleoside to the remainder of an oligonucleotide and the other of T₃ and T₄ is H, a hydroxyl protecting group, a linked conjugate group, or a 5′ or 3′-terminal group;
[0295] q₁, q₂, q₃, q₄, q₅, q₆ and q₇ are each, independently, H, C₁-C₆ alkyl, substituted C₁-C₆ alkyl, C₂-C₆ alkenyl, substituted C₂-C₆ alkenyl, C₂-C₆ alkynyl, or substituted C₂-C₆ alkynyl; and
[0296] each of R₁ and R₂ is independently selected from among: hydrogen, halogen, substituted or unsubstituted alkoxy, NJ₁J₂, SJ₁, N₃, OC(═X)J₁, OC(═X)NJ₁J₂, NJ₃C(═X)NJ₁J₂, and CN, wherein X is O, S or NJ₁, and each J₁, J₂, and J₃ is, independently, H or C₁-C₆ alkyl.

[0297] In certain embodiments, modified THP nucleosides are provided wherein q₁, q₂, q₃, q₄, q₅, q₆ and q₇ are each H.

[0298] In certain embodiments, at least one of q₁, q₂, q₃, q₄, q₅, q₆ and q₇ is other than H. In certain embodiments, at least one of q₁, q₂, q₃, q₄, q₅, q₆ and q is methyl. In certain embodiments, modified THP nucleosides are provided wherein one of R₁ and R₂ is F. In certain embodiments, R₁ is F and R₂ is H, in certain embodiments, R₁ is methoxy and R₂ is H, and in certain embodiments, R₁ is methoxyethoxy and R₂ is H.

[0299] In certain embodiments, sugar surrogates comprise rings having more than 5 atoms and more than one heteroatom. For example, nucleosides comprising morpholino sugar moieties and their use in oligonucleotides have been reported (see, e.g., Braasch et al., Biochemistry, 2002, 41, 4503-4510 and Summerton et al., U.S. Pat. No. 5,698,685; Summerton et al., U.S. Pat. No. 5,166,315; Summerton et al., U.S. Pat. No. 5,185,444; and Summerton et al., U.S. Pat. No. 5,034,506). As used here, the term “morpholino” means a sugar surrogate having the following structure:

[chemical structure]

[0300] In certain embodiments, morpholinos may be modified, for example by adding or altering various substituent groups from the above morpholino structure. Such sugar surrogates are referred to herein as “modified morpholinos.”

[0301] In certain embodiments, sugar surrogates comprise acyclic moieties. Examples of nucleosides and oligonucleotides comprising such acyclic sugar surrogates include but are not limited to: peptide nucleic acid (“PNA”), acyclic butyl nucleic acid (see, e.g., Kumar et al., Org. Biomol. Chem., 2013, 11, 5853-5865), and nucleosides and oligonucleotides described in Manoharan et al., WO2011/133876. Representative U.S. patents that teach the preparation of PNA compounds include, but are not limited to, U.S. Pat. Nos. 5,539,082; 5,714,331; and 5,719,262. Additional PNA compounds suitable for use in the oligonucleotides of the invention are described in, for example, in Nielsen et al., Science, 1991, 254, 1497-1500.

[0302] In certain embodiments, sugar surrogates are the “unlocked” sugar structure of UNA (unlocked nucleic acid) nucleosides. UNA is an unlocked acyclic nucleic acid, wherein any of the bonds of the sugar has been removed, forming an unlocked sugar surrogate. Representative U.S. publications that teach the preparation of UNA include, but are not limited to, U.S. Pat. No. 8,314,227; and US Patent Publication Nos. 2013/0096289; 2013/0011922; and 2011/0313020, the entire contents of each of which are hereby incorporated herein by reference.

[0303] In certain embodiments, sugar surrogates are the glycerol as found in GNA (glycol nucleic acid) nucleosides as depicted below:

### (S)-GNA

[chemical structure]

where Bx represents any nucleobase.

[0305] Many other bicyclic and tricyclic sugar and sugar surrogates are known in the art that can be used in modified nucleosides.

[0306] 2. Certain Modified Nucleobases

[0307] In certain embodiments, modified oligonucleotides comprise one or more nucleosides comprising an unmodified nucleobase. In certain embodiments, modified oligonucleotides comprise one or more nucleosides comprising a modified nucleobase. In certain embodiments, modified oligonucleotides comprise one or more nucleosides that does not comprise a nucleobase, referred to as an abasic nucleoside. In certain embodiments, modified oligonucleotides comprise one or more inosine nucleosides (i.e., nucleosides comprising a hypoxanthine nucleobase).

[0308] In certain embodiments, modified nucleobases are selected from: 5-substituted pyrimidines, 6-azapyrimidines, alkyl or alkynyl substituted pyrimidines, alkyl substituted purines, and N-2, N-6 and 0-6 substituted purines. In certain embodiments, modified nucleobases are selected from: 5-methylcytosine, 2-aminopropyladenine, 5-hydroxymethyl cytosine, xanthine, hypoxanthine, 2-aminoadenine, 6-N-methylguanine, 6-N-methyladenine, 2-propyladenine, 2-thiouracil, 2-thiothymine and 2-thiocytosine, 5-propynyl (—C≡C—CH₃) uracil, 5-propynylcytosine, 6-azouracil, 6-azocytosine, 6-azothymine, 5-ribosyluracil (pseudouracil), 4-thiouracil, 8-halo, 8-amino, 8-thiol, 8-thioalkyl, 8-hydroxyl, 8-aza and other 8-substituted purines, 5-halo, particularly 5-bromo, 5-trifluoromethyl, 5-halouracil, and 5-halocytosine, 7-methylguanine, 7-methyladenine, 2-F-adenine, 2-aminoadenine, 7-deazaguanine, 7-deazaadenine, 3-deazaguanine, 3-deazaadenine, 6-N-benzoyladenine, 2-N-isobutyrylguanine, 4-N-benzoylcytosine, 4-N-benzoylumcil, 5-methyl 4-N-benzoylcytosine, 5-methyl 4-N-benzoyluracil, universal bases, hydrophobic bases, promiscuous bases, size-expanded bases, and fluorinated bases. Further modified nucleobases include tricyclic pyrimidines, such as 1,3-diazaphenoxazine-2-one, 1,3-diazaphenothiazine-2-one and 9-(2-aminoethoxy)-1,3-diazaphenoxazine-2-one (G-clamp). Modified nucleobases may also include those in which the purine or pyrimidine base is replaced with other heterocycles, for example 7-deaza-adenine, 7-deazaguanosine, 2-aminopyridine and 2-pyridone. Further nucleobases include those disclosed in Merigan et al., U.S. Pat. No. 3,687,808, those disclosed in The Concise Encyclopedia Of Polymer Science And Engineering, Kroschwitz, J. I., Ed., John Wiley & Sons, 1990, 858-859; Englisch et al., Angewandte Chemie, International Edition, 1991, 30, 613; Sanghvi, Y. S., Chapter 15, Antisense Research and Applications, Crooke, S. T. and Lebleu, B., Eds., CRC Press, 1993, 273-288; and those disclosed in Chapters 6 and 15, Antisense Drug Technology, Crooke S. T., Ed., CRC Press, 2008, 163-166 and 442-443.

[0309] Publications that teach the preparation of certain of the above noted modified nucleobases as well as other modified nucleobases include without limitation, Manoharan et al., US2003/0158403; Manoharan et al., US2003/0175906; Dinh et al., U.S. Pat. No. 4,845,205; Spielvogel et al., U.S. Pat. No. 5,130,302; Rogers et al., U.S. Pat. No. 5,134,066; Bischofberger et al., U.S. Pat. No. 5,175,273; Urdea et al., U.S. Pat. No. 5,367,066; Benner et al., U.S. Pat. No. 5,432,272; Matteucci et al., U.S. Pat. No. 5,434,257; Gmeiner et al., U.S. Pat. No. 5,457,187; Cook et al., U.S. Pat. No. 5,459,255; Froehler et al., U.S. Pat. No. 5,484,908; Matteucci et al., U.S. Pat. No. 5,502,177; Hawkins et al., U.S. Pat. No. 5,525,711; Haralambidis et al., U.S. Pat. No. 5,552,540; Cook et al., U.S. Pat. No. 5,587,469; Froehler et al., U.S. Pat. No. 5,594,121; Switzer et al., U.S. Pat. No. 5,596,091; Cook et al., U.S. Pat. No. 5,614,617; Froehler et al., U.S. Pat. No. 5,645,985; Cook et al., U.S. Pat. No. 5,681,941; Cook et al., U.S. Pat. No. 5,811,534; Cook et al., U.S. Pat. No. 5,750,692; Cook et al., U.S. Pat. No. 5,948,903; Cook et al., U.S. Pat. No. 5,587,470; Cook et al., U.S. Pat. No. 5,457,191; Matteucci et al., U.S. Pat. No. 5,763,588; Froehler et al., U.S. Pat. No. 5,830,653; Cook et al., U.S. Pat. No. 5,808,027; Cook et al., U.S. Pat. No. 6,166,199; and Matteucci et al., U.S. Pat. No. 6,005,096.

[0310] 3. Certain Modified Internucleoside Linkages

[0311] The naturally occurring internucleoside linkage of RNA and DNA is a 3′ to 5′ phosphodiester linkage. In certain embodiments, nucleosides of modified oligonucleotides may be linked together using one or more modified internucleoside linkages. The two main classes of internucleoside linking groups are defined by the presence or absence of a phosphorus atom. Representative phosphorus-containing internucleoside linkages include but are not limited to phosphates, which contain a phosphodiester bond (“—O—P(═O)(OH)”) (also referred to as unmodified or naturally occurring linkages), phosphotriesters, methylphosphonates, phosphoramidates, and phosphorothioates (“—O—P(═S)(OH)—”), and phosphorodithioates (“—O—P(═S)(SH)”). Representative non-phosphorus containing internucleoside linking groups include but are not limited to methylenemethylimino (—CH₂—N(CH₃)—O—CH₂—), thiodiester, thionocarbamate (—O—C(═O)(NH)—S—); siloxane (—O—SiH₂—O—); and N,N′-dimethylhydrazine (—CH₂—N(CH₃)—N(CH₃)—). Modified internucleoside linkages, compared to naturally occurring phosphate linkages, can be used to alter, typically increase, nuclease resistance of the oligonucleotide. In certain embodiments, internucleoside linkages having a chiral atom can be prepared as a racemic mixture, or as separate enantiomers. Methods of preparation of phosphorous-containing and non-phosphorous-containing internucleoside linkages are well known to those skilled in the art.

[0312] In certain embodiments, a modified internucleoside linkage is any of those described in WO/2021/030778, incorporated by reference herein. In certain embodiments, a modified internucleoside linkage comprises the formula:

[chemical structure]

wherein independently for each internucleoside linking group of the modified oligonucleotide:

[0313] X is selected from O or S;

[0314] R₁ is selected from H, C₁-C₆ alkyl, and substituted C₁-C₆ alkyl; and

[0315] T is selected from SO₂R₂, C(═O)R₃, and P(═O)R₄R₅, wherein:

[0316] R₂ is selected from an aryl, a substituted aryl, a heterocycle, a substituted heterocycle, an aromatic heterocycle, a substituted aromatic heterocycle, a diazole, a substituted diazole, a C₁-C₆ alkoxy, C₁-C₆ alkyl, C₁-C₆ alkenyl, C₁-C₆ alkynyl, substituted C₁-C₆ alkyl, substituted C₁-C₆ alkenyl substituted C₁-C₆ alkynyl, and a conjugate group;

[0317] R₃ is selected from an aryl, a substituted aryl, CH₃, N(CH₃)₂, OCH₃ and a conjugate group;

[0318] R₄ is selected from OCH₃, OH, C₁-C₆ alkyl, substituted C₁-C₆ alkyl and a conjugate group; and
[0319] R₅ is selected from OCH₃, OH, C₁-C₆ alkyl, and substituted C₁-C₆ alkyl.
   In certain embodiments, a modified internucleoside linkage comprises a mesyl phosphoramidate linking group having a formula:

[chemical structure]

In certain embodiments, a mesyl phosphoramidate internucleoside linkage may comprise a chiral center. In certain embodiments, modified oligonucleotides comprising (Rp) and/or (Sp) mesyl phosphoramidates comprise one or more of the following formulas, respectively, wherein “B” indicates a nucleobase:

[chemical structure]

Representative internucleoside linkages having a chiral center include but are not limited to alkylphosphonates, mesyl phosphoramidates, and phosphorothioates. Modified oligonucleotides comprising internucleoside linkages having a chiral center can be prepared as populations of modified oligonucleotides comprising stereorandom internucleoside linkages, or as populations of modified oligonucleotides comprising phosphorothioate or other linkages containing chiral centers in particular stereochemical configurations. In certain embodiments, populations of modified oligonucleotides comprise phosphorothioate internucleoside linkages wherein all of the phosphorothioate internucleoside linkages are stereorandom. In certain embodiments, populations of modified oligonucleotides comprise mesyl phosphoramidate internucleoside linkages wherein all of the mesyl phosphoramidate internucleoside linkages are stereorandom. Such modified oligonucleotides can be generated using synthetic methods that result in random selection of the stereochemical configuration of each phosphorothioate or mesyl phosphoramidate linkage. Nonetheless, each individual phosphorothioate or mesyl phosphoramidate of each individual oligonucleotide molecule has a defined stereoconfiguration. In certain embodiments, populations of modified oligonucleotides are enriched for modified oligonucleotides comprising one or more particular phosphorothioate or mesyl phosphoramidate internucleoside linkages in a particular, independently selected stereochemical configuration. In certain embodiments, the particular configuration of the particular phosphorothioate or mesyl phosphoramidate linkage is present in at least 65% of the molecules in the population. In certain embodiments, the particular configuration of the particular phosphorothioate or mesyl phosphoramidate linkage is present in at least 70% of the molecules in the population. In certain embodiments, the particular configuration of the particular phosphorothioate or mesyl phosphoramidate linkage is present in at least 80% of the molecules in the population. In certain embodiments, the particular configuration of the particular phosphorothioate or mesyl phosphoramidate linkage is present in at least 90% of the molecules in the population. In certain embodiments, the particular configuration of the particular phosphorothioate or mesyl phosphoramidate linkage is present in at least 99% of the molecules in the population. Such chirally enriched populations of modified oligonucleotides can be generated using synthetic methods known in the art, e.g., methods described in Oka et al., JACCS 125, 8307 (2003), Wan et al. Nuc. Acid. Res. 42, 13456 (2014), and WO 2017/015555. In certain embodiments, a population of modified oligonucleotides is enriched for modified oligonucleotides having at least one indicated phosphorothioate or mesyl phosphoramidate in the (Sp) configuration. In certain embodiments, a population of modified oligonucleotides is enriched for modified oligonucleotides having at least one phosphorothioate or mesyl phosphoramidate in the (Rp) configuration. In certain embodiments, modified oligonucleotides comprising (Rp) and/or (Sp) phosphorothioates comprise one or more of the following formulas, respectively, wherein “B” indicates a nucleobase:

[chemical structure]

Unless otherwise indicated, chiral internucleoside linkages of modified oligonucleotides described herein can be stereorandom or in a particular stereochemical configuration.

[0320] Neutral internucleoside linkages include, without limitation, phosphotriesters, methylphosphonates, MMI (3′-CH₂—N(CH₃)—O-5′), amide-3 (3′-CH₂—C(═O)—N(H)-5′), amide-4 (3′-CH₂—N(H)—C(═O)-5′), formacetal (3′-O—CH₂—O-5′), methoxypropyl (MOP), and thioformacetal (3′-S—CH₂—O-5′). Further neutral internucleoside linkages include nonionic linkages comprising siloxane (dialkylsiloxane), carboxylate ester, carboxamide, sulfide, sulfonate ester and amides (See for example: Carbohydrate Modifications in Antisense Research; Y. S. Sanghvi and P. D. Cook, Eds., ACS Symposium Series 580; Chapters 3 and 4, 40-65). Further neutral internucleoside linkages include nonionic linkages comprising mixed N, O, S and CH₂ component parts.

[0321] In certain embodiments, modified oligonucleotides comprise one or more inverted nucleoside, as shown below:

[chemical structure]

wherein each Bx independently represents any nucleobase.

[0322] In certain embodiments, an inverted nucleoside is terminal (i.e., the last nucleoside on one end of an oligonucleotide) and so only one internucleoside linkage depicted above will be present. In certain such embodiments, additional features (such as a conjugate group) may be attached to the inverted nucleoside. Such terminal inverted nucleosides can be attached to either or both ends of an oligonucleotide.

[0323] In certain embodiments, such groups lack a nucleobase and are referred to herein as inverted sugar moieties. In certain embodiments, an inverted sugar moiety is terminal (i.e., attached to the last nucleoside on one end of an oligonucleotide) and so only one internucleoside linkage above will be present. In certain such embodiments, additional features (such as a conjugate group) may be attached to the inverted sugar moiety. Such terminal inverted sugar moieties can be attached to either or both ends of an oligonucleotide.

[0324] In certain embodiments, nucleic acids can be linked 2′ to 5′ rather than the standard 3′ to 5′ linkage. Such a linkage is illustrated below.

[chemical structure]

wherein each Bx represents any nucleobase.

[0325] B. Certain Motifs

[0326] In certain embodiments, modified oligonucleotides comprise one or more modified nucleosides comprising a modified sugar moiety. In certain embodiments, modified oligonucleotides comprise one or more modified nucleosides comprising a modified nucleobase. In certain embodiments, modified oligonucleotides comprise one or more modified internucleoside linkage. In such embodiments, the modified, unmodified, and differently modified sugar moieties, nucleobases, and/or internucleoside linkages of a modified oligonucleotide define a pattern or motif. In certain embodiments, the patterns of sugar moieties, nucleobases, and internucleoside linkages are each independent of one another. Thus, a modified oligonucleotide may be described by its sugar motif, nucleobase motif and/or internucleoside linkage motif (as used herein, nucleobase motif describes the modifications to the nucleobases independent of the sequence of nucleobases).

[0327] 1. Certain Sugar Motifs

[0328] In certain embodiments, oligonucleotides comprise one or more type of modified sugar and/or unmodified sugar moiety arranged along the oligonucleotide or region thereof in a defined pattern or sugar motif. In certain instances, such sugar motifs include but are not limited to any of the sugar modifications discussed herein.

### Gapmer Oligonucleotides

[0329] In certain embodiments, modified oligonucleotides comprise or consist of a region having a gapmer motif, which is defined by two external regions or “wings” and a central or internal region or “gap.” The three regions of a gapmer motif (the 5′-wing, the gap, and the 3′-wing) form a contiguous sequence of nucleosides wherein at least some of the sugar moieties of the nucleosides of each of the wings differ from at least some of the sugar moieties of the nucleosides of the gap. Specifically, at least the sugar moieties of the nucleosides of each wing that are closest to the gap (the 3′-most nucleoside of the 5′-wing and the 5′-most nucleoside of the 3′-wing) differ from the sugar moiety of the neighboring gap nucleosides, thus defining the boundary between the wings and the gap (i.e., the wing/gap junction). In certain embodiments, the sugar moieties within the gap are the same as one another. In certain embodiments, the gap includes one or more nucleoside having a sugar moiety that differs from the sugar moiety of one or more other nucleosides of the gap. In certain embodiments, the sugar motifs of the two wings are the same as one another (symmetric gapmer). In certain embodiments, the sugar motif of the 5′-wing differs from the sugar motif of the 3′-wing (asymmetric gapmer).

[0330] In certain embodiments, the wings of a gapmer comprise 1-6 nucleosides. In certain embodiments, each nucleoside of each wing of a gapmer comprises a modified sugar moiety. In certain embodiments, at least one nucleoside of each wing of a gapmer comprises a modified sugar moiety. In certain embodiments, at least two nucleosides of each wing of a gapmer comprises a modified sugar moiety. In certain embodiments, at least three nucleosides of each wing of a gapmer comprises a modified sugar moiety. In certain embodiments, at least four nucleosides of each wing of a gapmer comprises a modified sugar moiety.

[0331] In certain embodiments, the gap of a gapmer comprises 7-12 nucleosides. In certain embodiments, each nucleoside of the gap of a gapmer comprises a 2′-β-D-deoxyribosyl sugar moiety. In certain embodiments, at least one nucleoside of the gap of a gapmer comprises a modified sugar moiety.

[0332] In certain embodiments, the gapmer is a deoxy gapmer, i.e., a gapmer that comprises a deoxy segment. In certain embodiments, the nucleosides on the gap side of each wing/gap junction comprise 2′-deoxyribosyl sugar moieties and the nucleosides on the wing sides of each wing/gap junction comprise modified sugar moieties. In certain embodiments, each nucleoside of the gap comprises a 2′-β-D-deoxyribosyl sugar moiety. In certain embodiments, each nucleoside of each wing of a gapmer comprises a modified sugar moiety. In certain embodiments, at least one nucleoside of the gap of a gapmer comprises a modified sugar moiety. In certain embodiments, one nucleoside of the gap comprises a modified sugar moiety and each remaining nucleoside of the gap comprises a 2′-deoxyribosyl sugar moiety. In certain embodiments, at least one nucleoside of the gap of a gapmer comprises a 2′-OMe sugar moiety.

[0333] Herein, the lengths (number of nucleosides) of the three regions of a gapmer may be provided using the notation [# of nucleosides in the 5′-wing]−[# of nucleosides in the gap]−[# of nucleosides in the 3′-wing]. Thus, a 3-10-3 gapmer consists of 3 linked nucleosides in each wing and 10 linked nucleosides in the gap. Where such nomenclature is followed by a specific modification, that modification is the modification in each sugar moiety of each wing and the gap nucleosides comprise 2′-β-D-deoxyribosyl sugar moieties. Thus, a 5-10-5 MOE gapmer consists of 5 linked 2′-MOE nucleosides in the 5′-wing, 10 linked 2′-β-D-deoxynucleosides in the gap, and 5 linked 2′-MOE nucleosides in the 3′-wing. A 3-10-3 cEt gapmer consists of 3 linked cEt nucleosides in the 5′-wing, 10 linked 2′-β-D-deoxynucleosides in the gap, and 3 linked cEt nucleosides in the 3′-wing.

[0334] In certain embodiments, modified oligonucleotides are 5-10-5 MOE gapmers. In certain embodiments, modified oligonucleotides are 3-10-3 BNA gapmers. In certain embodiments, modified oligonucleotides are 3-10-3 cEt gapmers. In certain embodiments, modified oligonucleotides are 3-10-3 LNA gapmers.

[0335] In certain embodiments, provided is an oligomeric compound having a sugar motif (5′ to 3′) selected from: kkkddddddddddkkk, kkkdyddddddddkkk, kkdddddddddkekek, and kkkdddddddddkkke, wherein each “d” represents a 2′-β-D-deoxyribosyl sugar moiety, each “k” represents a cEt modified sugar moiety, each “y” represents a 2′-O-methylribosyl sugar moiety, and each “e” represents a 2′-MOE sugar moiety.

[0336] 2. Certain Nucleobase Motifs

[0337] In certain embodiments, oligonucleotides comprise modified and/or unmodified nucleobases arranged along the oligonucleotide or region thereof in a defined pattern or motif. In certain embodiments, each nucleobase is modified. In certain embodiments, none of the nucleobases are modified. In certain embodiments, each purine or each pyrimidine is modified. In certain embodiments, each adenine is modified. In certain embodiments, each guanine is modified. In certain embodiments, each thymine is modified. In certain embodiments, each uracil is modified. In certain embodiments, each cytosine is modified. In certain embodiments, some or all of the cytosine nucleobases in a modified oligonucleotide are 5-methyl cytosines. In certain embodiments, all of the cytosine nucleobases are 5-methyl cytosines and all of the other nucleobases of the modified oligonucleotide are unmodified nucleobases.

[0338] In certain embodiments, modified oligonucleotides comprise a block of modified nucleobases. In certain such embodiments, the block is at the 3′-end of the oligonucleotide. In certain embodiments the block is within 3 nucleosides of the 3′-end of the oligonucleotide. In certain embodiments, the block is at the 5′-end of the oligonucleotide. In certain embodiments the block is within 3 nucleosides of the 5′-end of the oligonucleotide.

[0339] In certain embodiments, oligonucleotides having a gapmer motif comprise a nucleoside comprising a modified nucleobase. In certain such embodiments, one nucleoside comprising a modified nucleobase is in the central gap of an oligonucleotide having a gapmer motif. In certain such embodiments, the sugar moiety of said nucleoside is a 2′-deoxyribosyl sugar moiety. In certain embodiments, the modified nucleobase is selected from: a 2-thiopyrimidine and a 5-propynepyrimidine.

[0340] 3. Certain Internucleoside Linkage Motifs

[0341] In certain embodiments, oligonucleotides comprise modified and/or unmodified internucleoside linkages arranged along the oligonucleotide or region thereof in a defined pattern or motif. In certain embodiments, each internucleoside linking group is a phosphodiester internucleoside linkage (P═O). In certain embodiments, each internucleoside linking group of a modified oligonucleotide is a phosphorothioate internucleoside linkage (P═S). In certain embodiments, each internucleoside linkage of a modified oligonucleotide is independently selected from a phosphorothioate internucleoside linkage and phosphodiester internucleoside linkage. In certain embodiments, each phosphorothioate internucleoside linkage is independently selected from a stereorandom phosphorothioate, a (Sp) phosphorothioate, and a (Rp) phosphorothioate.

[0342] In certain embodiments, the sugar motif of a modified oligonucleotide is a gapmer and the internucleoside linkages within the gap are all modified. In certain such embodiments, some or all of the internucleoside linkages in the wings are unmodified phosphodiester internucleoside linkages. In certain embodiments, the terminal internucleoside linkages are modified. In certain embodiments, the sugar motif of a modified oligonucleotide is a gapmer, and the internucleoside linkage motif comprises at least one phosphodiester internucleoside linkage in at least one wing, wherein the at least one phosphodiester linkage is not a terminal internucleoside linkage, and the remaining internucleoside linkages are phosphorothioate internucleoside linkages. In certain such embodiments, all of the phosphorothioate linkages are stereorandom. In certain embodiments, all of the phosphorothioate linkages in the wings are (Sp) phosphorothioates, and the gap comprises at least one Sp, Sp, Rp motif. In certain embodiments, populations of modified oligonucleotides are enriched for modified oligonucleotides comprising such internucleoside linkage motifs.

[0343] C. Certain Lengths

[0344] It is possible to increase or decrease the length of an oligonucleotide without eliminating activity. For example, in Woolf et al. (Proc. Natl. Acad. Sci. USA 89:7305-7309, 1992), a series of oligonucleotides 13-25 nucleobases in length were tested for their ability to induce cleavage of a target RNA in an oocyte injection model. Oligonucleotides 25 nucleobases in length with 8 or 11 mismatch bases near the ends of the oligonucleotides were able to direct specific cleavage of the target RNA, albeit to a lesser extent than the oligonucleotides that contained no mismatches. Similarly, target specific cleavage was achieved using 13 nucleobase oligonucleotides, including those with 1 or 3 mismatches.

[0345] In certain embodiments, oligonucleotides (including modified oligonucleotides) can have any of a variety of ranges of lengths. In certain embodiments, oligonucleotides consist of X to Y linked nucleosides, where X represents the fewest number of nucleosides in the range and Y represents the largest number nucleosides in the range. In certain such embodiments, X and Y are each independently selected from 8, 9, 10, 11, 12, 13, 14, 15, 16, 17, 18, 19, 20, 21, 22, 23, 24, 25, 26, 27, 28, 29, 30, 31, 32, 33, 34, 35, 36, 37, 38, 39, 40, 41, 42, 43, 44, 45, 46, 47, 48, 49, and 50; provided that X≤Y. For example, in certain embodiments, oligonucleotides consist of 12 to 13, 12 to 14, 12 to 15, 12 to 16, 12 to 17, 12 to 18, 12 to 19, 12 to 20, 12 to 21, 12 to 22, 12 to 23, 12 to 24, 12 to 25, 12 to 26, 12 to 27, 12 to 28, 12 to 29, 12 to 30, 13 to 14, 13 to 15, 13 to 16, 13 to 17, 13 to 18, 13 to 19, 13 to 20, 13 to 21, 13 to 22, 13 to 23, 13 to 24, 13 to 25, 13 to 26, 13 to 27, 13 to 28, 13 to 29, 13 to 30, 14 to 15, 14 to 16, 14 to 17, 14 to 18, 14 to 19, 14 to 20, 14 to 21, 14 to 22, 14 to 23, 14 to 24, 14 to 25, 14 to 26, 14 to 27, 14 to 28, 14 to 29, 14 to 30, 15 to 16, 15 to 17, 15 to 18, 15 to 19, 15 to 20, 15 to 21, 15 to 22, 15 to 23, 15 to 24, 15 to 25, 15 to 26, 15 to 27, 15 to 28, 15 to 29, 15 to 30, 16 to 17, 16 to 18, 16 to 19, 16 to 20, 16 to 21, 16 to 22, 16 to 23, 16 to 24, 16 to 25, 16 to 26, 16 to 27, 16 to 28, 16 to 29, 16 to 30, 17 to 18, 17 to 19, 17 to 20, 17 to 21, 17 to 22, 17 to 23, 17 to 24, 17 to 25, 17 to 26, 17 to 27, 17 to 28, 17 to 29, 17 to 30, 18 to 19, 18 to 20, 18 to 21, 18 to 22, 18 to 23, 18 to 24, 18 to 25, 18 to 26, 18 to 27, 18 to 28, 18 to 29, 18 to 30, 19 to 20, 19 to 21, 19 to 22, 19 to 23, 19 to 24, 19 to 25, 19 to 26, 19 to 29, 19 to 28, 19 to 29, 19 to 30, 20 to 21, 20 to 22, 20 to 23, 20 to 24, 20 to 25, 20 to 26, 20 to 27, 20 to 28, 20 to 29, 20 to 30, 21 to 22, 21 to 23, 21 to 24, 21 to 25, 21 to 26, 21 to 27, 21 to 28, 21 to 29, 21 to 30, 22 to 23, 22 to 24, 22 to 25, 22 to 26, 22 to 27, 22 to 28, 22 to 29, 22 to 30, 23 to 24, 23 to 25, 23 to 26, 23 to 27, 23 to 28, 23 to 29, 23 to 30, 24 to 25, 24 to 26, 24 to 27, 24 to 28, 24 to 29, 24 to 30, 25 to 26, 25 to 27, 25 to 28, 25 to 29, 25 to 30, 26 to 27, 26 to 28, 26 to 29, 26 to 30, 27 to 28, 27 to 29, 27 to 30, 28 to 29, 28 to 30, or 29 to 30 linked nucleosides.

[0346] D. Certain Modified Oligonucleotides

[0347] In certain embodiments, the above modifications (sugar, nucleobase, internucleoside linkage) are incorporated into a modified oligonucleotide. In certain embodiments, modified oligonucleotides are characterized by their modification motifs and overall lengths. In certain embodiments, such parameters are each independent of one another. Thus, unless otherwise indicated, each internucleoside linkage of an oligonucleotide having a gapmer sugar motif may be modified or unmodified and may or may not follow the gapmer modification pattern of the sugar modifications. For example, the internucleoside linkages within the wing regions of a sugar gapmer may be the same or different from one another and may be the same or different from the internucleoside linkages of the gap region of the sugar motif. Likewise, such sugar gapmer oligonucleotides may comprise one or more modified nucleobase independent of the gapmer pattern of the sugar modifications. Unless otherwise indicated, all modifications are independent of nucleobase sequence.

[0348] E. Certain Populations of Modified Oligonucleotides

[0349] Populations of modified oligonucleotides in which all of the modified oligonucleotides of the population have the same molecular formula can be stereorandom populations or chirally enriched populations. All of the chiral centers of all of the modified oligonucleotides are stereorandom in a stereorandom population. In a chirally enriched population, at least one particular chiral center is not stereorandom in the modified oligonucleotides of the population. In certain embodiments, the modified oligonucleotides of a chirally enriched population are enriched for β-D ribosyl sugar moieties, and all of the phosphorothioate internucleoside linkages are stereorandom. In certain embodiments, the modified oligonucleotides of a chirally enriched population are enriched for both β-D ribosyl sugar moieties and at least one, particular phosphorothioate internucleoside linkage in a particular stereochemical configuration.

[0350] F. Nucleobase Sequence

[0351] In certain embodiments, oligonucleotides (unmodified or modified oligonucleotides) are further described by their nucleobase sequence. In certain embodiments oligonucleotides have a nucleobase sequence that is complementary to a second oligonucleotide or an identified reference nucleic acid, such as a target nucleic acid. In certain such embodiments, a region of an oligonucleotide has a nucleobase sequence that is complementary to a second oligonucleotide or an identified reference nucleic acid, such as a target nucleic acid. In certain embodiments, the nucleobase sequence of a region or entire length of an oligonucleotide is at least 50%, at least 60%, at least 70%, at least 80%, at least 85%, at least 90%, at least 95%, or 100% complementary to the second oligonucleotide or nucleic acid, such as a target nucleic acid.

### II. Certain Oligomeric Compounds

[0352] In certain embodiments, provided herein are oligomeric compounds, which consist of an oligonucleotide (modified or unmodified) and optionally one or more conjugate groups and/or terminal groups. Conjugate groups consist of one or more conjugate moiety and a conjugate linker which links the conjugate moiety to the oligonucleotide. Conjugate groups may be attached to either or both ends of an oligonucleotide and/or at any internal position. In certain embodiments, conjugate groups are attached to the 2′-position of a nucleoside of a modified oligonucleotide. In certain embodiments, conjugate groups that are attached to either or both ends of an oligonucleotide are terminal groups. In certain such embodiments, conjugate groups or terminal groups are attached at the 3′ and/or 5′-end of oligonucleotides. In certain such embodiments, conjugate groups (or terminal groups) are attached at the 3′-end of oligonucleotides. In certain embodiments, conjugate groups are attached near the 3′-end of oligonucleotides. In certain embodiments, conjugate groups (or terminal groups) are attached at the 5′-end of oligonucleotides. In certain embodiments, conjugate groups are attached near the 5′-end of oligonucleotides.

[0353] Examples of terminal groups include but are not limited to conjugate groups, capping groups, phosphate moieties, protecting groups, modified or unmodified nucleosides, and two or more nucleosides that are independently modified or unmodified.

[0354] A. Certain Conjugate Groups

[0355] In certain embodiments, oligonucleotides are covalently attached to one or more conjugate groups. In certain embodiments, conjugate groups modify one or more properties of the attached oligonucleotide, including but not limited to pharmacodynamics, pharmacokinetics, stability, binding, absorption, tissue distribution, cellular distribution, cellular uptake, charge and clearance.

[0356] In certain embodiments, conjugation of one or more carbohydrate moieties to a modified oligonucleotide can optimize one or more properties of the modified oligonucleotide. In certain embodiments, the carbohydrate moiety is attached to a modified subunit of the modified oligonucleotide. For example, the ribose sugar of one or more ribonucleotide subunits of a modified oligonucleotide can be replaced with another moiety, e.g. a non-carbohydrate (preferably cyclic) carrier to which is attached a carbohydrate ligand. A ribonucleotide subunit in which the ribose sugar of the subunit has been so replaced is referred to herein as a ribose replacement modification subunit (RRMS), which is a modified sugar moiety. A cyclic carrier may be a carbocyclic ring system, i.e., one or more ring atoms may be a heteroatom, e.g., nitrogen, oxygen, sulphur. The cyclic carrier may be a monocyclic ring system, or may contain two or more rings, e.g. fused rings. The cyclic carrier may be a fully saturated ring system, or it may contain one or more double bonds. In certain embodiments, the modified oligonucleotide is a gapmer.

[0357] In certain embodiments, conjugate groups impart a new property on the attached oligonucleotide, e.g., fluorophores or reporter groups that enable detection of the oligonucleotide. Certain conjugate groups and conjugate moieties have been described previously, for example: cholesterol moiety (Letsinger et al., Proc. Natl. Acad. Sci. USA, 1989, 86, 6553-6556), cholic acid (Manoharan et al., Bioorg. Med. Chem. Lett., 1994, 4, 1053-1060), a thioether, e.g., hexyl-S-tritylthiol (Manoharan et al., Ann. N.Y. Acad. Sci., 1992, 660, 306-309; Manoharan et al., Bioorg. Med. Chem. Lett., 1993, 3, 2765-2770), a thiocholesterol (Oberhauser et al., Nucl. Acids Res., 1992, 20, 533-538), an aliphatic chain, e.g., do-decan-diol or undecyl residues (Saison-Behmoaras et al., EMBO J, 1991, 10, 1111-1118; Kabanov et al., FEBS Lett., 1990, 259, 327-330; Svinarchuk et al., Biochimie, 1993, 75, 49-54), a phospholipid, e.g., di-hexadecyl-rac-glycerol or triethyl-ammonium 1,2-di-O-hexadecyl-rac-glycero-3-H-phosphonate (Manoharan et al., Tetrahedron Lett., 1995, 36, 3651-3654; Shea et al., Nucl. Acids Res., 1990, 18, 3777-3783), a polyamine or a polyethylene glycol chain (Manoharan et al., Nucleosides & Nucleotides, 1995, 14, 969-973), or adamantane acetic acid a palmityl moiety (Mishra et al., Biochim. Biophys. Acta, 1995, 1264, 229-237), an octadecylamine or hexylamino-carbonyl-oxycholesterol moiety (Crooke et al., J. Pharmacol. Exp. Ther., 1996, 277, 923-937), a tocopherol group (Nishina et al., Molecular Therapy Nucleic Acids, 2015, 4, e220; and Nishina et al., Molecular Therapy, 2008, 16, 734-740), or a GalNAc cluster (e.g., WO2014/179620).

[0358] 1. Conjugate Moieties

[0359] Conjugate moieties include, without limitation, intercalators, reporter molecules, polyamines, polyamides, peptides, carbohydrates (e.g., GalNAc), vitamin moieties, polyethylene glycols, thioethers, polyethers, cholesterols, thiocholesterols, cholic acid moieties, folate, lipids, phospholipids, biotin, phenazine, phenanthridine, anthraquinone, adamantane, acridine, fluoresceins, rhodamines, coumarins, fluorophores, and dyes.

[0360] In certain embodiments, a conjugate moiety comprises an active drug substance, for example, aspirin, warfarin, phenylbutazone, ibuprofen, suprofen, fen-bufen, ketoprofen, (S)-(+)-pranoprofen, carprofen, dansylsarcosine, 2,3,5-triiodobenzoic acid, fingolimod, flufenamic acid, folinic acid, a benzothiadiazide, chlorothiazide, a diazepine, indo-methicin, a barbiturate, a cephalosporin, a sulfa drug, an antidiabetic, an antibacterial or an antibiotic.

[0361] 2. Conjugate Linkers

[0362] Conjugate moieties are attached to oligonucleotides through conjugate linkers. In certain oligomeric compounds, the conjugate linker is a single chemical bond (i.e., the conjugate moiety is attached directly to an oligonucleotide through a single bond). In certain embodiments, the conjugate linker comprises a chain structure, such as a hydrocarbyl chain, or an oligomer of repeating units such as ethylene glycol, nucleosides, or amino acid units.

[0363] In certain embodiments, a conjugate linker comprises pyrrolidine.

[0364] In certain embodiments, a conjugate linker comprises one or more groups selected from alkyl, amino, oxo, amide, disulfide, polyethylene glycol, ether, thioether, and hydroxylamino. In certain such embodiments, the conjugate linker comprises groups selected from alkyl, amino, oxo, amide and ether groups. In certain embodiments, the conjugate linker comprises groups selected from alkyl and amide groups. In certain embodiments, the conjugate linker comprises groups selected from alkyl and ether groups. In certain embodiments, the conjugate linker comprises at least one phosphorus moiety. In certain embodiments, the conjugate linker comprises at least one phosphate group. In certain embodiments, the conjugate linker includes at least one neutral linking group.

[0365] In certain embodiments, conjugate linkers, including the conjugate linkers described above, are bifunctional linking moieties, e.g., those known in the art to be useful for attaching conjugate groups to compounds, such as the oligonucleotides provided herein. In general, a bifunctional linking moiety comprises at least two functional groups. One of the functional groups is selected to bind to a particular site on a compound and the other is selected to bind to a conjugate group. Examples of functional groups used in a bifunctional linking moiety include but are not limited to electrophiles for reacting with nucleophilic groups and nucleophiles for reacting with electrophilic groups. In certain embodiments, bifunctional linking moieties comprise one or more groups selected from amino, hydroxyl, carboxylic acid, thiol, alkyl, alkenyl, and alkynyl.

[0366] Examples of conjugate linkers include but are not limited to pyrrolidine, 8-amino-3,6-dioxaoctanoic acid (ADO), succinimidyl 4-(N-maleimidomethyl) cyclohexane-1-carboxylate (SMCC) and 6-aminohexanoic acid (AHEX or AHA). Other conjugate linkers include but are not limited to substituted or unsubstituted C₁-C₁₀ alkyl, substituted or unsubstituted C₂-C₁₀ alkenyl or substituted or unsubstituted C₂-C₁₀ alkynyl, wherein a nonlimiting list of preferred substituent groups includes hydroxyl, amino, alkoxy, carboxy, benzyl, phenyl, nitro, thiol, thioalkoxy, halogen, alkyl, aryl, alkenyl and alkynyl.

[0367] In certain embodiments, conjugate linkers comprise 1-10 linker-nucleosides. In certain embodiments, conjugate linkers comprise 2-5 linker-nucleosides. In certain embodiments, conjugate linkers comprise exactly 3 linker-nucleosides. In certain embodiments, conjugate linkers comprise the TCA motif. In certain embodiments, such linker-nucleosides are modified nucleosides. In certain embodiments such linker-nucleosides comprise a modified sugar moiety. In certain embodiments, linker-nucleosides are unmodified. In certain embodiments, linker-nucleosides comprise an optionally protected heterocyclic base selected from a purine, substituted purine, pyrimidine or substituted pyrimidine. In certain embodiments, a cleavable moiety is a nucleoside selected from uracil, thymine, cytosine, 4-N-benzoylcytosine, 5-methyl cytosine, 4-N-benzoyl-5-methyl cytosine, adenine, 6-N-benzoyladenine, guanine and 2-N-isobutyrylguanine. It is typically desirable for linker-nucleosides to be cleaved from the oligomeric compound after it reaches a target tissue. Accordingly, linker-nucleosides are typically linked to one another and to the remainder of the oligomeric compound through cleavable bonds. In certain embodiments, such cleavable bonds are phosphodiester bonds.

[0368] Herein, linker-nucleosides are not considered to be part of the oligonucleotide. Accordingly, in embodiments in which an oligomeric compound comprises an oligonucleotide consisting of a specified number or range of linked nucleosides and/or a specified percent complementarity to a reference nucleic acid and the oligomeric compound also comprises a conjugate group comprising a conjugate linker comprising linker-nucleosides, those linker-nucleosides are not counted toward the length of the oligonucleotide and are not used in determining the percent complementarity of the oligonucleotide for the reference nucleic acid. For example, an oligomeric compound may comprise (1) a modified oligonucleotide consisting of 8-30 nucleosides and (2) a conjugate group comprising 1-10 linker-nucleosides that are contiguous with the nucleosides of the modified oligonucleotide. The total number of contiguous linked nucleosides in such an oligomeric compound is more than 30. Alternatively, an oligomeric compound may comprise a modified oligonucleotide consisting of 8-30 nucleosides and no conjugate group. The total number of contiguous linked nucleosides in such an oligomeric compound is no more than 30. Unless otherwise indicated conjugate linkers comprise no more than 10 linker-nucleosides. In certain embodiments, conjugate linkers comprise no more than 5 linker-nucleosides. In certain embodiments, conjugate linkers comprise no more than 3 linker-nucleosides. In certain embodiments, conjugate linkers comprise no more than 2 linker-nucleosides. In certain embodiments, conjugate linkers comprise no more than 1 linker-nucleoside.

[0369] In certain embodiments, it is desirable for a conjugate group to be cleaved from the oligonucleotide. For example, in certain circumstances oligomeric compounds comprising a particular conjugate moiety are better taken up by a particular cell type, but once the oligomeric compound has been taken up, it is desirable that the conjugate group be cleaved to release the unconjugated or parent oligonucleotide. Thus, certain conjugate linkers may comprise one or more cleavable moieties. In certain embodiments, a cleavable moiety is a cleavable bond. In certain embodiments, a cleavable moiety is a group of atoms comprising at least one cleavable bond. In certain embodiments, a cleavable moiety comprises a group of atoms having one, two, three, four, or more than four cleavable bonds. In certain embodiments, a cleavable moiety is selectively cleaved inside a cell or subcellular compartment, such as a lysosome. In certain embodiments, a cleavable moiety is selectively cleaved by endogenous enzymes, such as nucleases.

[0370] In certain embodiments, a cleavable bond is selected from among: an amide, an ester, an ether, one or both esters of a phosphodiester, a phosphate ester, a carbamate, or a disulfide. In certain embodiments, a cleavable bond is one or both of the esters of a phosphodiester. In certain embodiments, a cleavable moiety comprises a phosphate or phosphodiester. In certain embodiments, the cleavable moiety is a phosphate linkage between an oligonucleotide and a conjugate moiety or conjugate group.

[0371] In certain embodiments, a cleavable moiety comprises or consists of one or more linker-nucleosides. In certain such embodiments, the one or more linker-nucleosides are linked to one another and/or to the remainder of the oligomeric compound through cleavable bonds. In certain embodiments, such cleavable bonds are unmodified phosphodiester bonds. In certain embodiments, a cleavable moiety is 2′-deoxynucleoside that is attached to either the 3′ or 5′-terminal nucleoside of an oligonucleotide by a phosphate internucleoside linkage and covalently attached to the remainder of the conjugate linker or conjugate moiety by a phosphate or phosphorothioate linkage. In certain such embodiments, the cleavable moiety is 2′-deoxyadenosine.

[0372] 3. Cell-Targeting Moieties

[0373] In certain embodiments, a conjugate group comprises a cell-targeting moiety. In certain embodiments, a conjugate group has the general formula:

[chemical structure]

[0374] wherein n is from 1 to about 3, m is 0 when n is 1, m is 1 when n is 2 or greater, j is 1 or 0, and k is 1 or 0.

[0375] In certain embodiments, n is 1, j is 1 and k is 0. In certain embodiments, n is 1, j is 0 and k is 1. In certain embodiments, n is 1, j is 1 and k is 1. In certain embodiments, n is 2, j is 1 and k is 0. In certain embodiments, n is 2, j is 0 and k is 1. In certain embodiments, n is 2, j is 1 and k is 1. In certain embodiments, n is 3, j is 1 and k is 0. In certain embodiments, n is 3, j is 0 and k is 1. In certain embodiments, n is 3, j is 1 and k is 1.

[0376] In certain embodiments, conjugate groups comprise cell-targeting moieties that have at least one tethered ligand. In certain embodiments, cell-targeting moieties comprise two tethered ligands covalently attached to a branching group.

[0377] In certain embodiments, each ligand of a cell-targeting moiety has an affinity for at least one type of receptor on a target cell. In certain embodiments, each ligand has an affinity for at least one type of receptor on the surface of a mammalian liver cell. In certain embodiments, each ligand has an affinity for the hepatic asialoglycoprotein receptor (ASGP-R). In certain embodiments, each ligand is a carbohydrate.

[0378] In certain embodiments, a conjugate group comprises a cell-targeting conjugate moiety. In certain embodiments, a conjugate group has the general formula:

[chemical structure]

[0379] wherein n is from 1 to about 3, m is 0 when n is 1, m is 1 when n is 2 or greater, j is 1 or 0, and k is 1 or 0.
[0380] In certain embodiments, n is 1, j is 1 and k is 0. In certain embodiments, n is 1, j is 0 and k is 1. In certain embodiments, n is 1, j is 1 and k is 1. In certain embodiments, n is 2, j is 1 and k is 0. In certain embodiments, n is 2, j is 0 and k is 1. In certain embodiments, n is 2, j is 1 and k is 1. In certain embodiments, n is 3, j is 1 and k is 0. In certain embodiments, n is 3, j is 0 and k is 1. In certain embodiments, n is 3, j is 1 and k is 1.

[0381] In certain embodiments, conjugate groups comprise cell-targeting moieties that have at least one tethered ligand. In certain embodiments, cell-targeting moieties comprise two tethered ligands covalently attached to a branching group. In certain embodiments, cell-targeting moieties comprise three tethered ligands covalently attached to a branching group.

[0382] In certain embodiments, each ligand of a cell-targeting moiety has an affinity for at least one type of receptor on a target cell. In certain embodiments, each ligand has an affinity for at least one type of receptor on the surface of a mammalian liver cell. In certain embodiments, each ligand has an affinity for the hepatic asialoglycoprotein receptor (ASGP-R). In certain embodiments, each ligand is a carbohydrate. In certain embodiments, each ligand is, independently selected from galactose, N-acetyl galactoseamine (GalNAc), mannose, glucose, glucoseamine and fucose. In certain embodiments, each ligand is N-acetyl galactoseamine (GalNAc). In certain embodiments, the cell-targeting moiety comprises 3 GalNAc ligands. In certain embodiments, the cell-targeting moiety comprises 2 GalNAc ligands. In certain embodiments, the cell-targeting moiety comprises 1 GalNAc ligand.

[0383] In certain embodiments, each ligand of a cell-targeting moiety is a carbohydrate, carbohydrate derivative, modified carbohydrate, polysaccharide, modified polysaccharide, or polysaccharide derivative. In certain such embodiments, the conjugate group comprises a carbohydrate cluster (see, e.g., Maier et al., “Synthesis of Antisense Oligonucleotides Conjugated to a Multivalent Carbohydrate Cluster for Cellular Targeting,” Bioconjugate Chemistry, 2003, 14, 18-29 or Rensen et al., “Design and Synthesis of Novel N-Acetylgalactosamine-Terminated Glycolipids for Targeting of Lipoproteins to the Hepatic Asiaglycoprotein Receptor,” J. Med. Chem. 2004, 47, 5798-5808). In certain such embodiments, each ligand is an amino sugar or a thio sugar. For example, amino sugars may be selected from any number of compounds known in the art, such as sialic acid, α-D-galactosamine, β-muramic acid, 2-deoxy-2-methylamino-L-glucopyranose, 4,6-dideoxy-4-formamido-2,3-di-O-methyl-D-mannopyranose, 2-deoxy-2-sulfoamino-D-glucopyranose and N-sulfo-D-glucosamine, and N-glycoloyl-α-neuraminic acid. For example, thio sugars may be selected from 5-Thio-β-D-glucopyranose, methyl 2,3,4-tri-O-acetyl-1-thio-6-O-trityl-α-D-glucopyranoside, 4-thio-β-D-galactopyranose, and ethyl 3,4,6,7-tetra-O-acetyl-2-deoxy-1,5-dithio-α-D-gluco-heptopyranoside.

[0384] In certain embodiments, compounds comprise a conjugate group having the formula:

[chemical structure]

[0385] Representative United States patents, United States patent application publications, international patent application publications, and other publications that teach the preparation of certain of the above noted conjugate groups, compounds comprising conjugate groups, tethers, conjugate linkers, branching groups, ligands, cleavable moieties as well as other modifications include without limitation, U.S. Pat. Nos. 5,994,517, 6,300,319, 6,660,720, 6,906,182, 7,262,177, 7,491,805, 8,106,022, 7,723,509, US 2006/0148740, US 2011/0123520, WO 2013/033230 and WO 2012/037254, Biessen et al., J. Med. Chem. 1995, 38, 1846-1852, Lee et al., Bioorganic & Medicinal Chemistry 2011, 19, 2494-2500, Rensen et al., J. Biol. Chem. 2001, 276, 37577-37584, Rensen et al., J. Med. Chem. 2004, 47, 5798-5808, Sliedregt et al., J. Med. Chem. 1999, 42, 609-618, and Valentijn et al., Tetrahedron, 1997, 53, 759-770.

[0386] In certain embodiments, modified oligonucleotides comprise a gapmer or fully modified sugar motif and a conjugate group comprising at least one, two, or three GalNAc ligands. In certain embodiments, compounds comprise a conjugate group found in any of the following references: Lee, Carbohydr Res, 1978, 67, 509-514; Connolly et al., J Biol Chem, 1982, 257, 939-945; Pavia et al., Int J Pep Protein Res, 1983, 22, 539-548; Lee et al., Biochem, 1984, 23, 4255-4261; Lee et al., Glycoconjugate J, 1987, 4, 317-328; Toyokuni et al., Tetrahedron Lett, 1990, 31, 2673-2676; Biessen et al., J Med Chem, 1995, 38, 1538-1546; Valentijn et al., Tetrahedron, 1997, 53, 759-770; Kim et al., Tetrahedron Lett, 1997, 38, 3487-3490; Lee et al., Bioconjug Chem, 1997, 8, 762-765; Kato et al., Glycobiol, 2001, 11, 821-829; Rensen et al., J Biol Chem, 2001, 276, 37577-37584; Lee et al., Methods Enzymol, 2003, 362, 38-43; Westerlind et al., Glycoconj J, 2004, 21, 227-241; Lee et al., Bioorg Med Chem Lett, 2006, 16(19), 5132-5135; Maierhofer et al., Bioorg Med Chem, 2007, 15, 7661-7676; Khorev et al., Bioorg Med Chem, 2008, 16, 5216-5231; Lee et al., Bioorg Med Chem, 2011, 19, 2494-2500; Kornilova et al., Analyt Biochem, 2012, 425, 43-46; Pujol et al., Angew Chemie Int Ed Engl, 2012, 51, 7445-7448; Biessen et al., J Med Chem, 1995, 38, 1846-1852; Sliedregt et al., J Med Chem, 1999, 42, 609-618; Rensen et al., J Med Chem, 2004, 47, 5798-5808; Rensen et al., Arterioscler Thromb Vasc Biol, 2006, 26, 169-175; van Rossenberg et al., Gene Ther, 2004, 11, 457-464; Sato et al., J Am Chem Soc, 2004, 126, 14013-14022; Lee et al., J Org Chem, 2012, 77, 7564-7571; Biessen et al., FASEB J, 2000, 14, 1784-1792; Rajur et al., Bioconjug Chem, 1997, 8, 935-940; Duff et al., Methods Enzymol, 2000, 313, 297-321; Maier et al., Bioconjug Chem, 2003, 14, 18-29; Jayaprakash et al., Org Lett, 2010, 12, 5410-5413; Manoharan, Antisense Nucleic Acid Drug Dev, 2002, 12, 103-128; Merwin et al., Bioconjug Chem, 1994, 5, 612-620; Tomiya et al., Bioorg Med Chem, 2013, 21, 5275-5281; International applications WO1998/013381; WO2011/038356; WO1997/046098; WO2008/098788; WO2004/101619; WO2012/037254; WO2011/120053; WO2011/100131; WO2011/163121; WO2012/177947; WO2013/033230; WO2013/075035; WO2012/083185; WO2012/083046; WO2009/082607; WO2009/134487; WO2010/144740; WO2010/148013; WO1997/020563; WO2010/088537; WO2002/043771; WO2010/129709; WO2012/068187; WO2009/126933; WO2004/024757; WO2010/054406; WO2012/089352; WO2012/089602; WO2013/166121; WO2013/165816; U.S. Pat. Nos. 4,751,219; 8,552,163; 6,908,903; 7,262,177; 5,994,517; 6,300,319; 8,106,022; 7,491,805; 7,491,805; 7,582,744; 8,137,695; 6,383,812; 6,525,031; 6,660,720; 7,723,509; 8,541,548; 8,344,125; 8,313,772; 8,349,308; 8,450,467; 8,501,930; 8,158,601; 7,262,177; 6,906,182; 6,620,916; 8,435,491; 8,404,862; 7,851,615; Published U.S. Patent Application Publications US2011/0097264; US2011/0097265; US2013/0004427; US2005/0164235; US2006/0148740; US2008/0281044; US2010/0240730; US2003/0119724; US2006/0183886; US2008/0206869; US2011/0269814; US2009/0286973; US2011/0207799; US2012/0136042; US2012/0165393; US2008/0281041; US2009/0203135; US2012/0035115; US2012/0095075; US2012/0101148; US2012/0128760; US2012/0157509; US2012/0230938; US2013/0109817; US2013/0121954; US2013/0178512; US2013/0236968; US2011/0123520; US2003/0077829; US2008/0108801; and US2009/0203132.

[0387] B. Certain Terminal Groups

[0388] In certain embodiments, oligomeric compounds comprise one or more terminal groups. In certain such embodiments, oligomeric compounds comprise a stabilized 5′-phosphate. Stabilized 5′-phosphates include, but are not limited to 5′-phosphonates, including, but not limited to 5′-vinylphosphonates. In certain embodiments, terminal groups comprise one or more abasic sugar moieties and/or inverted nucleosides. In certain embodiments, terminal groups comprise one or more 2′-linked nucleosides or sugar moieties. In certain such embodiments, the 2′-linked group is an abasic sugar moiety.

### III. Antisense Activity

[0389] In certain embodiments, oligomeric compounds and oligomeric duplexes are capable of hybridizing to a target nucleic acid, resulting in at least one antisense activity; such oligomeric compounds and oligomeric duplexes are antisense compounds. In certain embodiments, antisense compounds have antisense activity when they reduce or inhibit the amount or activity of a target nucleic acid by 25% or more in the standard cell assay. In certain embodiments, antisense compounds selectively affect one or more target nucleic acid. Such antisense compounds comprise a nucleobase sequence that hybridizes to one or more target nucleic acid, resulting in one or more desired antisense activity and does not hybridize to one or more non-target nucleic acid or does not hybridize to one or more non-target nucleic acid in such a way that results in significant undesired antisense activity.

[0390] In certain antisense activities, hybridization of an antisense compound to a target nucleic acid results in recruitment of a protein that cleaves the target nucleic acid. For example, certain antisense compounds result in RNase H mediated cleavage of the target nucleic acid. RNase H is a cellular endonuclease that cleaves the RNA strand of an RNA:DNA duplex. The DNA in such an RNA:DNA duplex need not be unmodified DNA. In certain embodiments, described herein are antisense compounds that are sufficiently “DNA-like” to elicit RNase H activity. In certain embodiments, one or more non-DNA-like nucleoside in the gap of a gapmer is tolerated.

[0391] In certain antisense activities, an antisense compound or a portion of an antisense compound is loaded into an RNA-induced silencing complex (RISC), ultimately resulting in cleavage of the target nucleic acid. For example, certain antisense compounds result in cleavage of the target nucleic acid by Argonaute. Antisense compounds that are loaded into RISC are RNAi compounds. RNAi compounds may be double-stranded (siRNA or dsRNAi) or single-stranded (ssRNA).

[0392] In certain embodiments, hybridization of an antisense compound to a target nucleic acid does not result in recruitment of a protein that cleaves that target nucleic acid. In certain embodiments, hybridization of the antisense compound to the target nucleic acid results in alteration of splicing of the target nucleic acid. In certain embodiments, hybridization of an antisense compound to a target nucleic acid results in inhibition of a binding interaction between the target nucleic acid and a protein or other nucleic acid. In certain embodiments, hybridization of an antisense compound to a target nucleic acid results in alteration of translation of the target nucleic acid.

[0393] Antisense activities may be observed directly or indirectly. In certain embodiments, observation or detection of an antisense activity involves observation or detection of a change in an amount of a target nucleic acid or protein encoded by such target nucleic acid, a change in the ratio of splice variants of a nucleic acid or protein and/or a phenotypic change in a cell or animal.

### IV. Certain Target Nucleic Acids

[0394] In certain embodiments, oligomeric compounds comprise or consist of an oligonucleotide comprising a region that is complementary to a target nucleic acid. In certain embodiments, the target nucleic acid is an endogenous RNA molecule. In certain embodiments, the target nucleic acid encodes a protein. In certain such embodiments, the target nucleic acid is selected from: a mature mRNA and a pre-mRNA, including intronic, exonic and untranslated regions. In certain embodiments, the target RNA is a mature mRNA. In certain embodiments, the target nucleic acid is a pre-mRNA. In certain embodiments, the target region is entirely within an intron. In certain embodiments, the target region spans an intron/exon junction. In certain embodiments, the target region is at least 50% within an intron.

[0395] A. Complementarity/Mismatches to the Target Nucleic Acid and Duplex Complementarity

[0396] In certain embodiments, oligonucleotides are complementary to the target nucleic acid over the entire length of the oligonucleotide. In certain embodiments, oligonucleotides are 99%, 95%, 90%, 85%, or 80% complementary to the target nucleic acid. In certain embodiments, oligonucleotides are at least 80% complementary to the target nucleic acid over the entire length of the oligonucleotide and comprise a region that is 100% or fully complementary to a target nucleic acid. In certain embodiments, the region of full complementarity is from 6 to 20, 10 to 18, or 18 to 20 nucleobases in length.

[0397] It is possible to introduce mismatch bases without eliminating activity. For example, Gautschi et al (J. Natl. Cancer Inst. 93:463-471, March 2001) demonstrated the ability of an oligonucleotide having 100% complementarity to the bcl-2 mRNA and having 3 mismatches to the bcl-xL mRNA to reduce the expression of both bcl-2 and bcl-xL in vitro and in vivo. Furthermore, this oligonucleotide demonstrated potent anti-tumor activity in vivo. Maher and Dolnick (Nuc. Acid. Res. 16:3341-3358, 1988) tested a series of tandem 14 nucleobase oligonucleotides, and 28 and 42 nucleobase oligonucleotides comprised of the sequence of two or three of the tandem oligonucleotides, respectively, for their ability to arrest translation of human DHFR in a rabbit reticulocyte assay. Each of the three 14 nucleobase oligonucleotides alone was able to inhibit translation, albeit at a more modest level than the 28 or 42 nucleobase oligonucleotides.

[0398] In certain embodiments, oligonucleotides comprise one or more mismatched nucleobases relative to the target nucleic acid. In certain embodiments, antisense activity against the target is reduced by such mismatch, but activity against a non-target is reduced by a greater amount. Thus, in certain embodiments selectivity of the oligonucleotide is improved. In certain embodiments, the mismatch is specifically positioned within an oligonucleotide having a gapmer motif. In certain embodiments, the mismatch is at position 1, 2, 3, 4, 5, 6, 7, or 8 from the 5′-end of the gap region. In certain embodiments, the mismatch is at position 9, 8, 7, 6, 5, 4, 3, 2, 1 from the 3′-end of the gap region. In certain embodiments, the mismatch is at position 1, 2, 3, or 4 from the 5′-end of the wing region. In certain embodiments, the mismatch is at position 4, 3, 2, or 1 from the 3′-end of the wing region.

[0399] B. PSD3

[0400] In certain embodiments, oligomeric agents or oligomeric compounds comprise or consist of an oligonucleotide comprising a region that is complementary to a target nucleic acid, wherein the target nucleic acid is PSD3. In certain embodiments, PSD3 nucleic acid has the sequence set forth in SEQ ID NO: 1 (GENBANK Accession No. NC_000008.11, truncated from nucleosides 18524001 to 19090000) or SEQ ID NO: 2 (GENBANK Accession No. NM_015310.3). In certain embodiments, contacting a cell with an oligomeric compound complementary to SEQ ID NOs: 1 or 2 reduces the amount of PSD3 RNA, and in certain embodiments reduces the amount of PSD3 protein. In certain embodiments, the oligomeric compound consists of a modified oligonucleotide. In certain embodiments, the oligomeric compound comprises or consists of a modified oligonucleotide and a conjugate group.

[0401] C. Certain Target Nucleic Acids in Certain Tissues

[0402] In certain embodiments, oligomeric compounds comprise or consist of an oligonucleotide comprising a region that is complementary to a target nucleic acid, wherein the target nucleic acid is expressed in a pharmacologically relevant tissue. In certain embodiments, the pharmacologically relevant tissues are the liver cells and tissues.

### V. Certain Methods, Uses, and Indications

[0403] Certain embodiments provided herein relate to methods of inhibiting PSD3 expression, which can be useful for treating a disease associated with PSD3 in a subject, by administration of an oligomeric agent, oligomeric compound, modified oligonucleotide, or oligomeric duplex, any of which comprising a modified oligonucleotide having a nucleobase sequence complementary to a PSD3 nucleic acid.

[0404] Examples of diseases associated with PSD3 treatable with the oligomeric agents, oligomeric compounds, modified oligonucleotides, oligomeric duplexes, and methods provided herein include liver disease, fatty liver disease (FLD), nonalcoholic fatty liver disease (NAFLD), hepatic steatosis, non-alcoholic steatohepatitis (NASH), liver cirrhosis, hepatocellular carcinoma, alcoholic liver disease, alcoholic steatohepatitis (ASH), HCV hepatitis, chronic hepatitis, hereditary hemochromatosis, or primary sclerosing cholangitis.

[0405] In certain embodiments, a method comprises administering to a subject an oligomeric agent, oligomeric compound, modified oligonucleotide, or oligomeric duplex, any of which having a nucleobase sequence complementary to a PSD3 nucleic acid. In certain embodiments, the subject has liver disease, fatty liver disease (FLD), nonalcoholic fatty liver disease (NAFLD), hepatic steatosis, non-alcoholic steatohepatitis (NASH), liver cirrhosis, hepatocellular carcinoma, alcoholic liver disease, alcoholic steatohepatitis (ASH), HCV hepatitis, chronic hepatitis, hereditary hemochromatosis, or primary sclerosing cholangitis.

[0406] In certain embodiments, a method of treating liver disease, fatty liver disease (FLD), nonalcoholic fatty liver disease (NAFLD), hepatic steatosis, non-alcoholic steatohepatitis (NASH), liver cirrhosis, hepatocellular carcinoma, alcoholic liver disease, alcoholic steatohepatitis (ASH), HCV hepatitis, chronic hepatitis, hereditary hemochromatosis, or primary sclerosing cholangitis in a subject comprises administering to the subject a therapeutically effective amount of an oligomeric agent, oligomeric compound, modified oligonucleotide, or oligomeric duplex, any of which having a nucleobase sequence complementary to a PSD3 nucleic acid, thereby treating the subject. In certain embodiments, administering the therapeutically effective amount of the oligomeric agent, oligomeric compound, modified oligonucleotide, or oligomeric duplex reduces liver damage, steatosis, liver fibrosis, liver inflammation, liver scarring or cirrhosis, liver failure, liver enlargement, elevated transaminases, or hepatic fat accumulation in the subject.

[0407] In certain embodiments, a method of inhibiting expression of PSD3 nucleic acid, such as RNA, in a subject having a disease associated with PSD3 comprises administering to the subject an oligomeric agent, oligomeric compound, modified oligonucleotide, or oligomeric duplex, any of which having a nucleobase sequence complementary to a PSD3 nucleic acid, thereby inhibiting expression of PSD3 nucleic acid in the subject. In certain embodiments, administering the oligomeric agent, oligomeric compound, modified oligonucleotide, or oligomeric duplex inhibits expression of PSD3 in the liver. In certain embodiments, the subject has liver disease, fatty liver disease (FLD), nonalcoholic fatty liver disease (NAFLD), hepatic steatosis, non-alcoholic steatohepatitis (NASH), liver cirrhosis, hepatocellular carcinoma, alcoholic liver disease, alcoholic steatohepatitis (ASH), HCV hepatitis, chronic hepatitis, hereditary hemochromatosis, or primary sclerosing cholangitis.

[0408] In certain embodiments, a method of inhibiting expression of PSD3 nucleic acid in a cell comprises contacting the cell with an oligomeric agent, oligomeric compound, modified oligonucleotide, or oligomeric duplex, any of which having a nucleobase sequence complementary to a PSD3 nucleic acid, thereby inhibiting expression of PSD3 nucleic acid in the cell. In certain embodiments, the cell is a liver cell. In certain embodiments, the cell is in a subject having liver disease, fatty liver disease (FLD), nonalcoholic fatty liver disease (NAFLD), hepatic steatosis, non-alcoholic steatohepatitis (NASH), liver cirrhosis, hepatocellular carcinoma, alcoholic liver disease, alcoholic steatohepatitis (ASH), HCV hepatitis, chronic hepatitis, hereditary hemochromatosis, or primary sclerosing cholangitis.

[0409] Certain embodiments are drawn to an oligomeric agent, oligomeric compound, modified oligonucleotide, or oligomeric duplex, any of which having a nucleobase sequence complementary to a PSD3 nucleic acid, for use in treating a disease associated with PSD3. In certain embodiments, the disease is liver disease, fatty liver disease (FLD), nonalcoholic fatty liver disease (NAFLD), hepatic steatosis, non-alcoholic steatohepatitis (NASH), liver cirrhosis, hepatocellular carcinoma, alcoholic liver disease, alcoholic steatohepatitis (ASH), HCV hepatitis, chronic hepatitis, hereditary hemochromatosis, or primary sclerosing cholangitis. In certain embodiments, an oligomeric agent, oligomeric compound, modified oligonucleotide, or oligomeric duplex is for use in reducing liver damage, steatosis, liver fibrosis, liver inflammation, liver scarring or cirrhosis, liver failure, liver enlargement, elevated transaminases, or hepatic fat accumulation associated with liver disease, fatty liver disease (FLD), nonalcoholic fatty liver disease (NAFLD), hepatic steatosis, non-alcoholic steatohepatitis (NASH), liver cirrhosis, hepatocellular carcinoma, alcoholic liver disease, alcoholic steatohepatitis (ASH), HCV hepatitis, chronic hepatitis, hereditary hemochromatosis, or primary sclerosing cholangitis.

[0410] Certain embodiments are drawn to an oligomeric agent, oligomeric compound, modified oligonucleotide, or oligomeric duplex, any of which comprising a modified oligonucleotide having a nucleobase sequence complementary to a PSD3 nucleic acid, for the manufacture or preparation of a medicament for treating a disease associated with PSD3. In certain embodiments, the disease is liver disease, fatty liver disease (FLD), nonalcoholic fatty liver disease (NAFLD), hepatic steatosis, non-alcoholic steatohepatitis (NASH), liver cirrhosis, hepatocellular carcinoma, alcoholic liver disease, alcoholic steatohepatitis (ASH), HCV hepatitis, chronic hepatitis, hereditary hemochromatosis, or primary sclerosing cholangitis. In certain embodiments, an oligomeric agent, oligomeric compound, modified oligonucleotide, or oligomeric duplex is for the manufacture or preparation of a medicament for reducing liver damage, steatosis, liver fibrosis, liver inflammation, liver scarring or cirrhosis, liver failure, liver enlargement, elevated transaminases, or hepatic fat accumulation associated with liver disease, fatty liver disease (FLD), nonalcoholic fatty liver disease (NAFLD), hepatic steatosis, non-alcoholic steatohepatitis (NASH), liver cirrhosis, hepatocellular carcinoma, alcoholic liver disease, alcoholic steatohepatitis (ASH), HCV hepatitis, chronic hepatitis, hereditary hemochromatosis, or primary sclerosing cholangitis.

[0411] In any of the methods or uses described herein, the oligomeric agent, oligomeric compound, modified oligonucleotide, or oligomeric duplex can be any described herein.

### VI. Certain Pharmaceutical Compositions

[0412] In certain embodiments, described herein are pharmaceutical compositions comprising one or more oligomeric compounds. In certain embodiments, the one or more oligomeric compounds each consists of a modified oligonucleotide. In certain embodiments, the pharmaceutical composition comprises a pharmaceutically acceptable diluent or carrier. In certain embodiments, the pharmaceutically acceptable diluent is water or saline. In certain embodiments, a pharmaceutical composition comprises or consists of a sterile saline solution and one or more oligomeric compound. In certain embodiments, the sterile saline is pharmaceutical grade saline. In certain embodiments, a pharmaceutical composition comprises or consists of one or more oligomeric compound and sterile water. In certain embodiments, the sterile water is pharmaceutical grade water, e.g., water for injection. In certain embodiments, the saline is phosphate-buffered saline (PBS). In certain embodiments, the PBS is sterile PBS.

[0413] In certain embodiments, pharmaceutical compositions comprise one or more oligomeric compound and one or more excipients. In certain embodiments, excipients are selected from water, salt solutions, alcohol, polyethylene glycols, gelatin, lactose, amylase, magnesium stearate, talc, silicic acid, viscous paraffin, hydroxymethylcellulose and polyvinylpyrrolidone.

[0414] In certain embodiments, oligomeric compounds may be admixed with pharmaceutically acceptable active and/or inert substances for the preparation of pharmaceutical compositions or formulations. Compositions and methods for the formulation of pharmaceutical compositions depend on a number of criteria, including, but not limited to, route of administration, extent of disease, or dose to be administered.

[0415] In certain embodiments, pharmaceutical compositions comprising an oligomeric compound encompass any pharmaceutically acceptable salts of the oligomeric compound, esters of the oligomeric compound, or salts of such esters. In certain embodiments, pharmaceutical compositions comprising oligomeric compounds comprising one or more oligonucleotide, upon administration to an animal, including a human, are capable of providing (directly or indirectly) the biologically active metabolite or residue thereof. Accordingly, for example, the disclosure is also drawn to pharmaceutically acceptable salts of oligomeric compounds, prodrugs, pharmaceutically acceptable salts of such prodrugs, and other bioequivalents. Suitable pharmaceutically acceptable salts include, but are not limited to, sodium and potassium salts. In certain embodiments, prodrugs comprise one or more conjugate group attached to an oligonucleotide, wherein the conjugate group is cleaved by endogenous nucleases within the body.

[0416] Lipid moieties have been used in nucleic acid therapies in a variety of methods. In certain such methods, the nucleic acid, such as an oligomeric compound, is introduced into preformed liposomes or lipoplexes made of mixtures of cationic lipids and neutral lipids. In certain methods, DNA complexes with mono- or poly-cationic lipids are formed without the presence of a neutral lipid. In certain embodiments, a lipid moiety is selected to increase distribution of a pharmaceutical agent to a particular cell or tissue. In certain embodiments, a lipid moiety is selected to increase distribution of a pharmaceutical agent to fat tissue. In certain embodiments, a lipid moiety is selected to increase distribution of a pharmaceutical agent to muscle tissue.

[0417] In certain embodiments, pharmaceutical compositions comprise a delivery system. Examples of delivery systems include, but are not limited to, liposomes and emulsions. Certain delivery systems are useful for preparing certain pharmaceutical compositions including those comprising hydrophobic compounds. In certain embodiments, certain organic solvents such as dimethylsulfoxide are used.

[0418] In certain embodiments, pharmaceutical compositions comprise one or more tissue-specific delivery molecules designed to deliver the one or more pharmaceutical agents of the present invention to specific tissues or cell types. For example, in certain embodiments, pharmaceutical compositions include liposomes coated with a tissue-specific antibody.

[0419] In certain embodiments, pharmaceutical compositions comprise a co-solvent system. Certain of such co-solvent systems comprise, for example, benzyl alcohol, a nonpolar surfactant, a water-miscible organic polymer, and an aqueous phase. In certain embodiments, such co-solvent systems are used for hydrophobic compounds. A non-limiting example of such a co-solvent system is the VPD co-solvent system, which is a solution of absolute ethanol comprising 3% w/v benzyl alcohol, 8% w/v of the nonpolar surfactant Polysorbate 80™ and 65% w/v polyethylene glycol 300. The proportions of such co-solvent systems may be varied considerably without significantly altering their solubility and toxicity characteristics. Furthermore, the identity of co-solvent components may be varied: for example, other surfactants may be used instead of Polysorbate 80™; the fraction size of polyethylene glycol may be varied; other biocompatible polymers may replace polyethylene glycol, e.g., polyvinyl pyrrolidone; and other sugars or polysaccharides may substitute for dextrose.

[0420] In certain embodiments, a pharmaceutical composition is prepared for administration by injection (e.g., intravenous, subcutaneous, etc.). In certain of such embodiments, a pharmaceutical composition comprises a carrier and is formulated in aqueous solution, such as water or physiologically compatible buffers such as Hanks's solution, Ringer's solution, or physiological saline buffer. In certain embodiments, other ingredients are included (e.g., ingredients that aid in solubility or serve as preservatives). In certain embodiments, injectable suspensions are prepared using appropriate liquid carriers, suspending agents and the like. Certain pharmaceutical compositions for injection are presented in unit dosage form, e.g., in ampoules or in multi-dose containers. Certain pharmaceutical compositions for injection are suspensions, solutions or emulsions in oily or aqueous vehicles, and may contain formulatory agents such as suspending, stabilizing and/or dispersing agents. Certain solvents suitable for use in pharmaceutical compositions for injection include, but are not limited to, lipophilic solvents and fatty oils, such as sesame oil, synthetic fatty acid esters, such as ethyl oleate or triglycerides, and liposomes.

[0421] Under certain conditions, certain compounds disclosed herein act as acids. Although such compounds may be drawn or described in protonated (free acid) form, or ionized and in association with a cation (salt) form, aqueous solutions of such compounds exist in equilibrium among such forms. For example, a phosphate linkage of an oligonucleotide in aqueous solution exists in equilibrium among free acid, anion and salt forms. Unless otherwise indicated, compounds described herein are intended to include all such forms. Moreover, certain oligonucleotides have several such linkages, each of which is in equilibrium. Thus, oligonucleotides in solution exist in an ensemble of forms at multiple positions all at equilibrium. The term “oligonucleotide” is intended to include all such forms. Drawn structures necessarily depict a single form. Nevertheless, unless otherwise indicated, such drawings are likewise intended to include corresponding forms. Herein, a structure depicting the free acid of a compound followed by the term “or a salt thereof” expressly includes all such forms that may be fully or partially protonated/de-protonated/in association with a cation. In certain instances, one or more specific cation is identified.

[0422] In certain embodiments, modified oligonucleotides or oligomeric compounds are in aqueous solution with sodium. In certain embodiments, modified oligonucleotides or oligomeric compounds are in aqueous solution with potassium. In certain embodiments, modified oligonucleotides or oligomeric compounds are in PBS. In certain embodiments, modified oligonucleotides or oligomeric compounds are in water. In certain such embodiments, the pH of the solution is adjusted with NaOH and/or HCl to achieve a desired pH.

### VI. Certain Compositions

[0423] Compound No. 1436573

[0424] In certain embodiments, Compound No. 1436573 is characterized as a 3-10-3 cEt gapmer conjugated at the 5′-end to a conjugate group. Compound 1436573 has a sequence (from 5′ to 3′) of ATCTATTGGAGAAGTG (SEQ ID NO: 3037), wherein nucleosides 1-3 and 14-16 are cEt sugar moieties (from 5′ to 3′), and each of nucleosides 4-13 are 2′-β-D-deoxyribosyl sugar moieties, and wherein each internucleoside linkage is a phosphorothioate internucleoside linkage. Compound No. 1436573 has a 5′-trishexylamino-(THA)-C₆GalNAc₃ endcap, represented by the structure below, wherein the phosphate group is attached at the 5-oxygen atom of the 5-nucleoside:

[chemical structure]

[0425] In certain embodiments, Compound No. 1436573 is represented by the following chemical notation: THA-GalNAc-ₒAₖₛTₖₛ^{m}CₖₛTₐₛAₐₛTₐₛTₐₛGₐₛGₐₛAₐₛGₐₛAₐₛAₐₛGₖₛTₖₛGₖ (SEQ ID NO: 3037), wherein:

[0426] A=an adenine nucleobase,

[0427] ^{m}C=a 5-methyl cytosine nucleobase,

[0428] G=a guanine nucleobase,

[0429] T=a thymine nucleobase,

[0430] k=a cEt modified sugar moiety,

[0431] d=a 2′-β-D-deoxyribosyl sugar moiety, and

[0432] s=a phosphorothioate internucleoside linkage.

[0433] In certain embodiments, Compound No. 1436573 is represented by the following chemical structure:

[chemical structure]

or a salt thereof.

[0434] In certain embodiments, the sodium salt of Compound No. 1436573 is represented by the following chemical structure:

[chemical structure]

[0435] In certain embodiments, Compound No. 1436573 is in anionic form.

[0436] Compound No. 1454987

[0437] In certain embodiments, Compound No. 1454987 is characterized as a 3-10-3 cEt gapmer conjugated at the 5′-end to a conjugate group. Compound 1454987 has a sequence (from 5′ to 3′) of AGTATAAAGAAGTGTT (SEQ ID NO: 3039), wherein nucleosides 1-3 and 14-16 are cEt sugar moieties (from 5′ to 3′), and each of nucleosides 4-13 are 2′-β-D-deoxyribosyl sugar moieties, and wherein each internucleoside linkage is a phosphorothioate internucleoside linkage. Compound No. 1454987 has a 5′-trishexylamino-(THA)-C₆GalNAc₃ endcap, represented by the structure below, wherein the phosphate group is attached at the 5′-oxygen atom of the 5′-nucleoside:

[chemical structure]

[0438] In certain embodiments, Compound No. 1454987 is represented by the following chemical notation: THA-GalNAc-ₒAₖₛGₖₛTₖₛA_{ds}T_{ds}A_{ds}A_{ds}A_{ds}G_{ds}A_{ds}A_{ds}G_{ds}T_{ds}GₖₛTₖₛTₖ (SEQ ID NO: 3039), wherein:

[0439] A=an adenine nucleobase,

[0440] G=a guanine nucleobase,

[0441] T=a thymine nucleobase,

[0442] k=a cEt modified sugar moiety,

[0443] d=a 2′-β-D-deoxyribosyl sugar moiety, and

[0444] s=a phosphorothioate internucleoside linkage.

[0445] In certain embodiments, Compound No. 1454987 is represented by the following chemical structure:

[chemical structure]

or a salt thereof.

[0446] In certain embodiments, the sodium salt of Compound No. 1454987 is represented by the following chemical structure:

[chemical structure]

[0447] In certain embodiments, Compound No. 1454987 is in anionic form.

[0448] Compound No. 1545962

[0449] In certain embodiments, Compound No. 1545962 is characterized as a 2-9-5 MOE/cEt mixed wing gapmer conjugated at the 5′-end to a conjugate group. Compound 1545962 has a sequence (from 5′ to 3′) of CTATTGGAGAAGTGTA (SEQ ID NO: 3041), wherein nucleosides 1-2 have sugar modifications of k-k (from 5′ to 3′), wherein nucleosides 12-16 have sugar modifications of k-e-k-e-k, wherein each ‘e’ represents a 2′-MOE sugar moiety, and each ‘k’ refers to a cEt sugar moiety; and each of nucleosides 3-11 are 2′-β-D-deoxynucleosides; wherein the internucleoside linkages between nucleosides 1 to 16 are phosphorothioate internucleoside linkages, and wherein each cytosine is a 5-methylcytosine. Compound No. 1545962 has a 5′-trishexylamino-(THA)-C₆GalNAc₃ endcap, represented by the structure below, wherein the phosphate group is attached at the 5′-oxygen atom of the 5′-nucleoside:

[chemical structure]

[0450] In certain embodiments, Compound No. 1545962 is represented by the following chemical notation: THA-C₆-GalNAc₃-^{m}CₖₛTₖₛA_{ds}T_{ds}T_{ds}G_{ds}G_{ds}A_{ds}G_{ds}A_{ds}A_{ds}G_{cs}TₑₛG_{cs}TₑₛAₖ (SEQ ID NO: 3041), wherein:

[0451] A=an adenine nucleobase,

[0452] ^{m}C=a 5-methylcytosine nucleobase,

[0453] G=a guanine nucleobase,

[0454] T=a thymine nucleobase,

[0455] e=a 2′-OCH₂CH₂OCH₃ modified ribosyl sugar moiety,

[0456] k=a cEt sugar moiety,

[0457] d=a 2′-β-D-deoxyribosyl sugar moiety, and

[0458] s=a phosphorothioate internucleoside linkage.

[0459] In certain embodiments, Compound No. 1545962 is represented by the following chemical structure:

[chemical structure]

or a salt thereof.

[0460] In certain embodiments, the sodium salt of Compound No. 1545962 is represented by the following chemical structure:

[chemical structure]

[0461] In certain embodiments, Compound No. 1545962 is in anionic form.

### NONLIMITING DISCLOSURE AND INCORPORATION BY REFERENCE

[0462] Each of the literature and patent publications listed herein is incorporated by reference in its entirety.

[0463] While certain compounds, compositions and methods described herein have been described with specificity in accordance with certain embodiments, the following examples serve only to illustrate the compounds described herein and are not intended to limit the same. Each of the references, GenBank accession numbers, ENSEMBL identifiers, and the like recited in the present application is incorporated herein by reference in its entirety.

[0464] Although the sequence listing accompanying this filing identifies each sequence as either “RNA” or “DNA” as required, in reality, those sequences may be modified with any combination of chemical modifications. One of skill in the art will readily appreciate that such designation as “RNA” or “DNA” to describe modified oligonucleotides is, in certain instances, arbitrary. For example, an oligonucleotide comprising a nucleoside comprising a 2′-OH sugar moiety and a thymine base could be described as a DNA having a modified sugar (2′-OH in place of one 2′-H of DNA) or as an RNA having a modified base (thymine (methylated uracil) in place of an uracil of RNA). Accordingly, nucleic acid sequences provided herein, including, but not limited to those in the sequence listing, are intended to encompass nucleic acids containing any combination of natural or modified RNA and/or DNA, including, but not limited to such nucleic acids having modified nucleobases. By way of further example and without limitation, an oligomeric compound having the nucleobase sequence “ATCGATCG” encompasses any oligomeric compounds having such nucleobase sequence, whether modified or unmodified, including, but not limited to, such compounds comprising RNA bases, such as those having sequence “AUCGAUCG” and those having some DNA bases and some RNA bases such as “AUCGATCG” and oligomeric compounds having other modified nucleobases, such as “AT^{m}CGAUCG,” wherein ^{m}C indicates a cytosine base comprising a methyl group at the 5-position.

[0465] Certain compounds described herein (e.g., modified oligonucleotides) have one or more asymmetric center and thus give rise to enantiomers, diastereomers, and other stereoisomeric configurations that may be defined, in terms of absolute stereochemistry, as (R) or (S), as α or β such as for sugar anomers, or as (D) or (L), such as for amino acids, etc. Compounds provided herein that are drawn or described as having certain stereoisomeric configurations include only the indicated compounds. Compounds provided herein that are drawn or described with undefined stereochemistry include all such possible isomers, including their stereorandom and optically pure forms, unless specified otherwise. Likewise, tautomeric forms of the compounds herein are also included unless otherwise indicated. Unless otherwise indicated, compounds described herein are intended to include corresponding salt forms.

[0466] The compounds described herein include variations in which one or more atoms are replaced with a non-radioactive isotope or radioactive isotope of the indicated element. For example, compounds herein that comprise hydrogen atoms encompass all possible deuterium substitutions for each of the ¹H hydrogen atoms. Isotopic substitutions encompassed by the compounds herein include but are not limited to: ²H or ³H in place of ¹H, ¹³C or ¹⁴C in place of ¹²C, ¹⁵N in place of ¹⁴N, ¹⁷O or ¹⁸O in place of ¹⁶O, and ³³S, ³⁴S, ³⁵S, or ³⁶S in place of ³²S. In certain embodiments, non-radioactive isotopic substitutions may impart new properties on the oligomeric compound that are beneficial for use as a therapeutic or research tool. In certain embodiments, radioactive isotopic substitutions may make the compound suitable for research or diagnostic purposes such as imaging.

### EXAMPLES

[0467] The following examples illustrate certain embodiments of the present disclosure and are not limiting. Moreover, where specific embodiments are provided, the inventors have contemplated generic application of those specific embodiments. For example, disclosure of an oligonucleotide having a particular motif provides reasonable support for additional oligonucleotides having the same or similar motif. And, for example, where a particular high-affinity modification appears at a particular position, other high-affinity modifications at the same position are considered suitable, unless otherwise indicated.

### Example 1: Effect of Modified Oligonucleotides on Human PSD3 RNA In Vitro, Single Dose

[0468] Modified oligonucleotides complementary to a human PSD3 nucleic acid were designed and tested for their single dose effects on PSD3 RNA in vitro. The modified oligonucleotides were tested in a series of experiments that had the same culture conditions.

[0469] “Start site” indicates the 5′-most nucleoside to which the modified oligonucleotide is complementary in the target nucleic acid sequence. “Stop site” indicates the 3′-most nucleoside to which the modified oligonucleotide is complementary in the target nucleic acid sequence. Each modified oligonucleotide listed in the table below is 100% complementary to SEQ ID NO: 1 (the complement of GENBANK Accession No. NC_000008.11, truncated from nucleosides 18524001 to 19090000), to SEQ ID NO: 2 (GENBANK Accession No. NM_015310.3), or to both. “N/A” indicates that the modified oligonucleotide is not 100% complementary to that particular target nucleic acid sequence.

[0470] Cultured A431 cells were treated with modified oligonucleotide at a concentration of 2,000 nM by free uptake at a density of 10,000 cells per well. After a treatment period of approximately 48 hours, total RNA was isolated from the cells, and PSD3 RNA levels were measured by quantitative real-time RTPCR. PSD3 RNA levels were measured by either human primer-probe set RTS41429 (forward sequence GCAAAACACCTTGGCAAGA, designated herein as SEQ ID NO: 3; reverse sequence CTCGTTCTTGAGTTTCTCCCA, designated herein as SEQ ID NO: 4; probe sequence ACCTGAGTGACTGATCCAGCGTCA, designated herein as SEQ ID NO: 5) or human primer-probe set RTS41435 (forward sequence CTTGGCTCGGAAAATTCATGC, designated herein as SEQ ID NO: 6; reverse sequence TCATCCTTTTGCAAGTAAAGAACT, designated herein as SEQ ID NO: 7; probe sequence AGGTTTTCCATCCTCGTTTTCCTCTTGG, designated herein as SEQ ID NO: 8) as indicated in the tables below. PSD3 RNA levels were normalized to total RNA content, as measured by RIBOGREEN®. Reduction of PSD3 RNA is presented in the table below as percent PSD3 RNA relative to the amount in untreated control cells (% UTC). The values marked with a “℄” indicate that the modified oligonucleotide is complementary to the amplicon region of the primer probe set. Additional assays may be used to measure the potency and efficacy of the modified oligonucleotides complementary to the amplicon region. Each separate experiment described in this example is identified by an Assay Identification letter in the table column labeled “AID”.

[0471] The modified oligonucleotides in the Table 1 and Table 2 below are 3-10-3 cEt modified oligonucleotides with uniform phosphorothioate internucleoside linkages. The modified oligonucleotides are 16 nucleosides in length, wherein the central gap segment consists of ten 2′-β-D-deoxynucleosides, and wherein the 5′ and 3′ wing segments each consist of three cEt nucleosides. The sugar motif for the modified oligonucleotides is (from 5′ to 3′): kkkddddddddddkkk; wherein each “d” represents a 2′-β-D-deoxyribosyl sugar moiety, and each “k” represents a cEt modified sugar moiety. The internucleoside linkage motif for the modified oligonucleotides is (from 5′ to 3′): sssssssssssssss; wherein each “s” represents a phosphorothioate internucleoside linkage. Each cytosine residue is a 5-methylcytosine.

TABLE 1
Reduction of PSD3 RNA by 3-10-3 cEt modified oligonucleotides with uniform phosphorothioate
internucleoside linkages

| | SEQ ID | SEQ ID | SEQ ID | SEQ ID | | PSD3 | | |
|---|---|---|---|---|---|---|---|---|
| | NO: 1 | NO: 1 | NO: 2 | NO: 2 | | (% | | SEQ |
| Compound | Start | Stop | Start | Stop | | UTC) | | ID |
| No. | Site | Site | Site | Site | Sequence (5′ to 3′) | RTS41429 | AID | NO |
| 1173382 | 217279 | 217294 | 245 | 260 | GGAGTAAAGTGCTTCC | 71 | A | 20 |
| 1173386 | 217661 | 217676 | 627 | 642 | GTTTTACGACTGGCAG | 32 | A | 21 |
| 1173390 | 217983 | 217998 | 949 | 964 | GCTTCGATCACATCCC | 29 | A | 22 |
| 1173393 | 221996 | 222011 | 1406 | 1421 | CGTCGGTGGAGTCCTC | 37 | A | 23 |
| 1173397 | 222143 | 222158 | 1553 | 1568 | CTTCTTTAATGCGCTG | 35 | A | 24 |
| 1173401 | 285407 | 285422 | 1941 | 1956 | GCAACTAGTTTGCTAA | 76† | A | 25 |
| 1173405 | 290677 | 290692 | 2156 | 2171 | CGGTATTAAGAAGCAT | 8 | A | 26 |
| 1173409 | 457220 | 457235 | 2345 | 2360 | CAGTACTTTCTGAGGG | 72 | A | 27 |
| 1173413 | 457351 | 457366 | 2476 | 2491 | ATGAATTTTCCGAGCC | 61 | A | 28 |
| 1173417 | 554091 | 554106 | 3080 | 3095 | CGTTACTCAGTAGCTC | 73 | A | 29 |
| 1173421 | 554181 | 554196 | 3170 | 3185 | TACGCTTGACTTTGGC | 63 | A | 30 |
| 1173425 | 554454 | 554469 | 3443 | 3458 | AGCTATCAAGTTGCAA | 98 | A | 31 |
| 1173429 | 554584 | 554599 | 3573 | 3588 | AAGTTTAACAGTTGAT | 71 | A | 32 |
| 1173433 | 554765 | 554780 | 3754 | 3769 | GCAACTAGATTCCCAG | 81 | A | 33 |
| 1173437 | 554857 | 554872 | 3846 | 3861 | CCTACGATCTTCACGC | 56 | A | 34 |
| 1173441 | 554906 | 554921 | 3895 | 3910 | ATGGAATCAGCACTTC | 69 | A | 35 |
| 1173445 | 555119 | 555134 | 4108 | 4123 | GGATATCAACGATAGA | 67 | A | 36 |
| 1173449 | 555900 | 555915 | 4889 | 4904 | ACATACCACTTAGACA | 69 | A | 37 |
| 1173453 | 556170 | 556185 | 5159 | 5174 | ATCTGATACATGGGCC | 84 | A | 38 |
| 1173457 | 556308 | 556323 | 5297 | 5312 | TCTAGGTACCTCTCTC | 54 | A | 39 |
| 1173461 | 556451 | 556466 | 5440 | 5455 | GCAAGGTACCATTCAA | 68 | A | 40 |
| 1173465 | 556533 | 556548 | 5522 | 5537 | CTCATATGACACGGAC | 53 | A | 41 |
| 1173469 | 556613 | 556628 | 5602 | 5617 | TATACTGAAGCTTCAA | 86 | A | 42 |
| 1173473 | 556823 | 556838 | 5812 | 5827 | TAGGCAAATCAGTGAC | 60 | A | 43 |
| 1173477 | 557563 | 557578 | 6552 | 6567 | TAGGATAACAGTTGGA | 35 | A | 44 |
| 1173481 | 557814 | 557829 | 6803 | 6818 | ATCTTTACATGATAGA | 110 | A | 45 |
| 1173485 | 558246 | 558261 | 7235 | 7250 | CTCATAAACTAGACTT | 67 | A | 46 |
| 1173489 | 558506 | 558521 | 7495 | 7510 | TGCTATCAATAATCTA | 73 | A | 47 |
| 1173493 | 558869 | 558884 | 7858 | 7873 | GCCTGTAAGAATAGTC | 74 | A | 48 |
| 1173497 | 559241 | 559256 | 8230 | 8245 | GTATTGCACACAGTAC | 74 | A | 49 |
| 1173501 | 559603 | 559618 | 8592 | 8607 | TAGGATACAGTACCCA | 77 | A | 50 |
| 1173504 | 559757 | 559772 | 8746 | 8761 | GCAGTAAGCTCAAACA | 81 | A | 51 |
| 1173508 | 559950 | 559965 | 8939 | 8954 | GCTGAAGTTAGTCTCC | 68 | A | 52 |
| 1173512 | 560232 | 560247 | 9221 | 9236 | AAATGGTTAAGGCCCA | 54 | A | 53 |
| 1173516 | 560515 | 560530 | 9504 | 9519 | CTCCTTATACACCTAA | 73 | A | 54 |
| 1173520 | 561028 | 561043 | 10017 | 10032 | CAGTCGGAGCTCTCTT | 78 | A | 55 |
| 1173524 | 561147 | 561162 | 10136 | 10151 | CTATTCCTAAGAGCTT | 75 | A | 56 |
| 1173528 | 561251 | 561266 | 10240 | 10255 | CTTATTTATGGCGACC | 60 | A | 57 |
| 1173532 | 561506 | 561521 | 10495 | 10510 | GCAGGGTCACGCTATC | 67 | A | 58 |
| 1173536 | 561837 | 561852 | 10826 | 10841 | AATGGGTTCCTAAAGC | 88 | A | 59 |
| 1173540 | 561914 | 561929 | 10903 | 10918 | TACAAATTATCGCCTT | 61 | A | 60 |
| 1173544 | 561993 | 562008 | 10982 | 10997 | ATTAGTTTGAGCCACA | 67 | A | 61 |
| 1173548 | 562164 | 562179 | 11153 | 11168 | CTTACCCAAAACTGCT | 77 | A | 62 |
| 1173552 | 562224 | 562239 | 11213 | 11228 | CCAGAATCTGGTAGGT | 98 | A | 63 |
| 1173556 | 562559 | 562574 | 11548 | 11563 | AATTTTGTTGCCGTAA | 72 | A | 64 |
| 1173560 | 19133 | 19148 | N/A | N/A | GATAATCAATCTAGGT | 99 | A | 65 |
| 1173564 | 48336 | 48351 | N/A | N/A | AGTCAATATGTATCAG | 93 | A | 66 |
| 1173568 | 66240 | 66255 | N/A | N/A | AGACATTGCAGCTCTA | 63 | A | 67 |
| | 280858 | 280873 | | | | | | |
| 1173572 | 109978 | 109993 | N/A | N/A | ATACACTGATCTATGT | 65 | A | 68 |
| | 110004 | 110019 | | | | | | |
| 1173576 | 127690 | 127705 | N/A | N/A | AGACTAAAGTTATCAA | 77 | A | 69 |
| 1173580 | 135804 | 135819 | N/A | N/A | AATATTAACACGGCAC | 55 | A | 70 |
| 1173584 | 146122 | 146137 | N/A | N/A | GAAATTATGGCACCCT | 62 | A | 71 |
| 1173588 | 188558 | 188573 | N/A | N/A | GTATTATTGATAGGCG | 33 | A | 72 |
| 1173592 | 212148 | 212163 | N/A | N/A | GCTAGATGCCTATCTT | 75 | A | 73 |
| | 212460 | 212475 | | | | | | |
| 1173596 | 234350 | 234365 | N/A | N/A | GACACAATGGCCAGTT | 68 | A | 74 |
| | 237553 | 237568 | | | | | | |
| 1173600 | 261641 | 261656 | N/A | N/A | CTTATTAGTAATGGGA | 43 | A | 75 |
| 1173604 | 275472 | 275487 | N/A | N/A | TATACTAAGTTGCTGC | 43 | A | 76 |
| 1173608 | 308838 | 308853 | N/A | N/A | CTTATTAACCCCAGTT | 56 | A | 77 |
| 1173612 | 332820 | 332835 | N/A | N/A | CTGGGATCTGGACGCG | 76 | A | 78 |
| | 338098 | 338113 | | | | | | |
| 1173616 | 332895 | 332910 | N/A | N/A | GATCTGTAACTACTCA | 44 | A | 79 |
| | 338173 | 338188 | | | | | | |
| 1173620 | 332972 | 332987 | N/A | N/A | TTATCCCATGCCGTAC | 57 | A | 80 |
| | 338250 | 338265 | | | | | | |
| 1173624 | 333037 | 333052 | N/A | N/A | CTGCTAGCCACTTAAC | 59 | A | 81 |
| | 338315 | 338330 | | | | | | |
| 1173628 | 333074 | 333089 | N/A | N/A | CCCAGTCAGAACAACT | 58 | A | 82 |
| | 338352 | 338367 | | | | | | |
| 1173632 | 333132 | 333147 | N/A | N/A | CGCCACCACTAGTCAC | 56 | A | 83 |
| | 338410 | 338425 | | | | | | |
| 1173636 | 333234 | 333249 | N/A | N/A | CCAGAAGCCTAAACCG | 49 | A | 84 |
| | 338512 | 338527 | | | | | | |
| 1173640 | 333331 | 333346 | N/A | N/A | CATCACCAGAGGAAGT | 68 | A | 85 |
| | 338609 | 338624 | | | | | | |
| 1173644 | 333408 | 333423 | N/A | N/A | CTGAAACGATCCTTAC | 57 | A | 86 |
| | 338686 | 338701 | | | | | | |
| 1173648 | 353309 | 353324 | N/A | N/A | ACGGAAATAATGGTGC | 51 | A | 87 |
| | 354724 | 354739 | | | | | | |
| 1173652 | 353463 | 353478 | N/A | N/A | AATCCTACATTCAGTA | 56 | A | 88 |
| | 354883 | 354898 | | | | | | |
| 1173656 | 387074 | 387089 | N/A | N/A | AGCTATAGGTACTCTT | 64 | A | 89 |
| | 387392 | 387407 | | | | | | |
| 1173660 | 396082 | 396097 | N/A | N/A | TATATTAGATGGTGCA | 71 | A | 90 |
| 1173664 | 411102 | 411117 | N/A | N/A | TAATTTATGCATCCCT | 70 | A | 91 |
| 1173668 | 447633 | 447648 | N/A | N/A | ATTATAATGTACGAGT | 63 | A | 92 |
| 1173672 | 468126 | 468141 | N/A | N/A | TTAATTATAGTGTCGC | 57 | A | 93 |
| 1173676 | 499668 | 499683 | N/A | N/A | GATAGTAAATCAAACG | 101 | A | 94 |
| 1173680 | 508432 | 508447 | N/A | N/A | GTATATCACAAGCTCT | 56 | A | 95 |
| 1173684 | 534266 | 534281 | N/A | N/A | TAATTTATCAACCCCC | 87 | A | 96 |
| 1173688 | 539595 | 539610 | N/A | N/A | ATTATTAACTGGACTC | 55 | A | 97 |
| 1173383 | 217280 | 217295 | 246 | 261 | GGGAGTAAAGTGCTTC | 55 | B | 98 |
| 1173387 | 217781 | 217796 | 747 | 762 | AGCGCGGTGAGATCTT | 46 | B | 99 |
| 1173391 | 218082 | 218097 | 1048 | 1063 | TATAGGATGCTGGGTC | 30 | B | 100 |
| 1173394 | 222075 | 222090 | 1485 | 1500 | GAGTATAATGTCTCCA | 51 | B | 101 |
| 1173398 | 222193 | 222208 | 1603 | 1618 | CAGGATATCCTGATGT | 87 | B | 102 |
| 1173402 | 285409 | 285424 | 1943 | 1958 | CTGCAACTAGTTTGCT | 94† | B | 103 |
| 1173406 | 290679 | 290694 | 2158 | 2173 | ATCGGTATTAAGAAGC | 21 | B | 104 |
| 1173410 | 457274 | 457289 | 2399 | 2414 | TAGTACTTCCAATACG | 69 | B | 105 |
| 1173414 | 514794 | 514809 | 2663 | 2678 | CATAGTCCGTGGCCTT | 61 | B | 106 |
| 1173418 | 554142 | 554157 | 3131 | 3146 | TCAGCGAAGGACTCGA | 60 | B | 107 |
| 1173422 | 554210 | 554225 | 3199 | 3214 | AGGTCGGTGATCCTTC | 84 | B | 108 |
| 1173426 | 554461 | 554476 | 3450 | 3465 | GTGCATTAGCTATCAA | 82 | B | 109 |
| 1173430 | 554671 | 554686 | 3660 | 3675 | TATATTAACTCCAGCT | 80 | B | 110 |
| 1173434 | 554766 | 554781 | 3755 | 3770 | AGCAACTAGATTCCCA | 76 | B | 111 |
| 1173438 | 554859 | 554874 | 3848 | 3863 | ATCCTACGATCTTCAC | 60 | B | 112 |
| 1173442 | 554975 | 554990 | 3964 | 3979 | GGGTATCAATCTTTCC | 104 | B | 113 |
| 1173446 | 555691 | 555706 | 4680 | 4695 | TAGGGATTACAGAGTT | 63 | B | 114 |
| 1173450 | 556110 | 556125 | 5099 | 5114 | CTTAGTTACTGCCTTT | 63 | B | 115 |
| 1173454 | 556224 | 556239 | 5213 | 5228 | GACAGATAACTTGCTT | 54 | B | 116 |
| 1173458 | 556392 | 556407 | 5381 | 5396 | TAGATATAGACTGTGG | 59 | B | 117 |
| 1173462 | 556488 | 556503 | 5477 | 5492 | GTATTTCAACACTACT | 90 | B | 118 |
| 1173466 | 556544 | 556559 | 5533 | 5548 | AATATTAGTGACTCAT | 58 | B | 119 |
| 1173470 | 556614 | 556629 | 5603 | 5618 | GTATACTGAAGCTTCA | 92 | B | 120 |
| 1173474 | 556950 | 556965 | 5939 | 5954 | TGAATTGGGCAACAGG | 60 | B | 121 |
| 1173478 | 557565 | 557580 | 6554 | 6569 | ATTAGGATAACAGTTG | 36 | B | 122 |
| 1173482 | 557932 | 557947 | 6921 | 6936 | GTTAGTAAGACAATGG | 54 | B | 123 |
| 1173486 | 558453 | 558468 | 7442 | 7457 | TGCTATAAGACTGGTG | 57 | B | 124 |
| 1173490 | 558513 | 558528 | 7502 | 7517 | TCTCTATTGCTATCAA | 53 | B | 125 |
| 1173494 | 558972 | 558987 | 7961 | 7976 | GATATGCAATCTACAC | 65 | B | 126 |
| 1173498 | 559324 | 559339 | 8313 | 8328 | GTTACTAAGACTGCAC | 68 | B | 127 |
| 1173502 | 559670 | 559685 | 8659 | 8674 | AGTTTAAACCTGGTCC | 57 | B | 128 |
| 1173505 | 559781 | 559796 | 8770 | 8785 | ACCTATTTACACTCTA | 71 | B | 129 |
| 1173509 | 559974 | 559989 | 8963 | 8978 | ACCAACACATTACTGC | 65 | B | 130 |
| 1173513 | 560423 | 560438 | 9412 | 9427 | CACTTTACTGTCCCCT | 66 | B | 131 |
| 1173517 | 560767 | 560782 | 9756 | 9771 | GATATGGATCCCCTCA | 74 | B | 132 |
| 1173521 | 561029 | 561044 | 10018 | 10033 | TCAGTCGGAGCTCTCT | 55 | B | 133 |
| 1173525 | 561179 | 561194 | 10168 | 10183 | GAATTGAAGTTAGGGT | 79 | B | 134 |
| 1173529 | 561254 | 561269 | 10243 | 10258 | AGACTTATTTATGGCG | 65 | B | 135 |
| 1173533 | 561520 | 561535 | 10509 | 10524 | GATACCTTGCCTCAGC | 77 | B | 136 |
| 1173537 | 561865 | 561880 | 10854 | 10869 | ATAAATTCTCCGCTAG | 80 | B | 137 |
| 1173541 | 561916 | 561931 | 10905 | 10920 | GATACAAATTATCGCC | 69 | B | 138 |
| 1173545 | 561996 | 562011 | 10985 | 11000 | CCAATTAGTTTGAGCC | 62 | B | 139 |
| 1173549 | 562181 | 562196 | 11170 | 11185 | TGTTATAGTACCGCCA | 60 | B | 140 |
| 1173553 | 562449 | 562464 | 11438 | 11453 | ACATATCAGATGACTC | 73 | B | 141 |
| 1173557 | 562560 | 562575 | 11549 | 11564 | AAATTTTGTTGCCGTA | 64 | B | 142 |
| 1173561 | 30111 | 30126 | N/A | N/A | GTCTTCTATAACCACT | 42 | B | 143 |
| | 246101 | 246116 | | | | | | |
| 1173565 | 58138 | 58153 | N/A | N/A | ATCTAACTCAATCTCA | 69 | B | 144 |
| | 271496 | 271511 | | | | | | |
| 1173569 | 75453 | 75468 | N/A | N/A | ACCGCAAATCTTTCCC | 101 | B | 145 |
| 1173573 | 110067 | 110082 | N/A | N/A | GAACAGTATCCTTCTA | 56 | B | 146 |
| | 505465 | 505480 | | | | | | |
| 1173577 | 128244 | 128259 | N/A | N/A | GTATTTAAGATTACCA | 55 | B | 147 |
| 1173581 | 141625 | 141640 | N/A | N/A | GGATTTAAGTCGGGTC | 48 | B | 148 |
| 1173585 | 176695 | 176710 | N/A | N/A | CTCGGGTTGATTCTTC | 121 | B | 149 |
| 1173589 | 189828 | 189843 | N/A | N/A | ATTATCGAACCATCTT | 29 | B | 150 |
| 1173593 | 216180 | 216195 | N/A | N/A | ATTAGTAAGATCACTA | 103 | B | 151 |
| 1173597 | 235209 | 235224 | N/A | N/A | TACACAATTTAGCTCT | 16 | B | 152 |
| | 235282 | 235297 | | | | | | |
| 1173601 | 263009 | 263024 | N/A | N/A | AGTGATATGAATGGTA | 16 | B | 153 |
| | 263050 | 263065 | | | | | | |
| 1173605 | 278066 | 278081 | N/A | N/A | CTTATTAAGTTTGGAC | 31 | B | 154 |
| 1173609 | 314456 | 314471 | N/A | N/A | CATTTTAACTCGGGTA | 33 | B | 155 |
| 1173613 | 332827 | 332842 | N/A | N/A | ACATTAACTGGGATCT | 49 | B | 156 |
| | 338105 | 338120 | | | | | | |
| 1173617 | 332911 | 332926 | N/A | N/A | TTGGGATTACTTTCCA | 83 | B | 157 |
| | 338189 | 338204 | | | | | | |
| 1173621 | 332989 | 333004 | N/A | N/A | CTTAGAGGAAGGTGTT | 38 | B | 158 |
| | 338267 | 338282 | | | | | | |
| 1173625 | 333044 | 333059 | N/A | N/A | GGGCACACTGCTAGCC | 107 | B | 159 |
| | 338322 | 338337 | | | | | | |
| 1173629 | 333081 | 333096 | N/A | N/A | TCCATAACCCAGTCAG | 43 | B | 160 |
| | 338359 | 338374 | | | | | | |
| 1173633 | 333145 | 333160 | N/A | N/A | GATCACCCGGAGGCGC | 103 | B | 161 |
| | 338423 | 338438 | | | | | | |
| 1173637 | 333271 | 333286 | N/A | N/A | AGCGGTGACAGGGAGG | 72 | B | 162 |
| | 338549 | 338564 | | | | | | |
| 1173641 | 333385 | 333400 | N/A | N/A | CCCTGTGAAGTTGTTC | 40 | B | 163 |
| | 338663 | 338678 | | | | | | |
| 1173645 | 341270 | 341285 | N/A | N/A | AGTTATAATACGGCAG | 35 | B | 164 |
| 1173649 | 353320 | 353335 | N/A | N/A | CATGTTGAGATACGGA | 50 | B | 165 |
| | 354735 | 354750 | | | | | | |
| 1173653 | 367783 | 367798 | N/A | N/A | AGTAATATGTCAGTGG | 61 | B | 166 |
| 1173657 | 389692 | 389707 | N/A | N/A | GAATTTATCATATCGG | 48 | B | 167 |
| 1173661 | 397335 | 397350 | N/A | N/A | ACAGAACCTGATTGGA | 100 | B | 168 |
| 1173665 | 430854 | 430869 | N/A | N/A | GTATTAATGAAGGGCA | 74 | B | 169 |
| 1173669 | 454855 | 454870 | N/A | N/A | AGTTATAATAAGGTGT | 81 | B | 170 |
| 1173673 | 480943 | 480958 | N/A | N/A | GTCATAATATGGATAG | 56 | B | 171 |
| | 480962 | 480977 | | | | | | |
| 1173677 | 505147 | 505162 | N/A | N/A | AACGGGTATGTAGAGC | 89 | B | 172 |
| 1173681 | 514919 | 514934 | N/A | N/A | GCAATAAAGTAGTGCT | 93 | B | 173 |
| 1173685 | 536169 | 536184 | N/A | N/A | AATATTAGCTGTACCA | 73 | B | 174 |
| 1173689 | 543123 | 543138 | N/A | N/A | ACATATAAGTTGCACA | 63 | B | 175 |
| 1173239 | 221982 | 221997 | 1392 | 1407 | TCCGTATATCCAGGCC | 51 | C | 176 |
| 1173384 | 217448 | 217463 | 414 | 429 | TCTGTAACACTGTCGA | 37 | C | 177 |
| 1173388 | 217790 | 217805 | 756 | 771 | CCAGTTAACAGCGCGG | 44 | C | 178 |
| 1173395 | 222089 | 222104 | 1499 | 1514 | AGCTATCAGGCTCTGA | 67 | C | 179 |
| 1173399 | 222222 | 222237 | 1632 | 1647 | ATCACGATGCCACCAT | 34 | C | 180 |
| 1173403 | 288679 | 288694 | 2074 | 2089 | TCTATTGGAGAAGTGT | 5 | C | 181 |
| 1173407 | 290681 | 290696 | 2160 | 2175 | AGATCGGTATTAAGAA | 56 | C | 182 |
| 1173411 | 457279 | 457294 | 2404 | 2419 | GTTAGTAGTACTTCCA | 75 | C | 183 |
| 1173415 | 533685 | 533700 | 2924 | 2939 | GCTCGGTGGTGATCTG | 54 | C | 184 |
| 1173419 | 554152 | 554167 | 3141 | 3156 | GTATCCGGGTTCAGCG | 82 | C | 185 |
| 1173423 | 554322 | 554337 | 3311 | 3326 | TATATTCACGGATTAC | 82 | C | 186 |
| 1173427 | 554490 | 554505 | 3479 | 3494 | ATCACGATCCCCTCCT | 70 | C | 187 |
| 1173431 | 554672 | 554687 | 3661 | 3676 | GTATATTAACTCCAGC | 102 | C | 188 |
| 1173435 | 554774 | 554789 | 3763 | 3778 | CATATTGGAGCAACTA | 72 | C | 189 |
| 1173439 | 554863 | 554878 | 3852 | 3867 | CTCAATCCTACGATCT | 108 | C | 190 |
| 1173443 | 555015 | 555030 | 4004 | 4019 | GCCGATTATTGCCCCC | 76 | C | 191 |
| 1173447 | 555740 | 555755 | 4729 | 4744 | AGTGATACTATTAGTT | 62 | C | 192 |
| 1173451 | 556148 | 556163 | 5137 | 5152 | GTAACTATCCTGTTTG | 77 | C | 193 |
| 1173455 | 556243 | 556258 | 5232 | 5247 | TTAGATTATCAGGTAG | 77 | C | 194 |
| 1173459 | 556393 | 556408 | 5382 | 5397 | ATAGATATAGACTGTG | 59 | C | 195 |
| 1173463 | 556515 | 556530 | 5504 | 5519 | TGCTATAGTGGTGCTG | 87 | C | 196 |
| 1173467 | 556550 | 556565 | 5539 | 5554 | GGAGTTAATATTAGTG | 62 | C | 197 |
| 1173471 | 556713 | 556728 | 5702 | 5717 | ATGCGCTAAAGATGGA | 83 | C | 198 |
| 1173475 | 557291 | 557306 | 6280 | 6295 | TAAAGTAAGGACTCTG | 95 | C | 199 |
| 1173479 | 557568 | 557583 | 6557 | 6572 | TAGATTAGGATAACAG | 53 | C | 200 |
| 1173483 | 558041 | 558056 | 7030 | 7045 | AAGCTAAACTTCTGTG | 92 | C | 201 |
| 1173487 | 558454 | 558469 | 7443 | 7458 | ATGCTATAAGACTGGT | 97 | C | 202 |
| 1173491 | 558615 | 558630 | 7604 | 7619 | GATACTGTAGGTACAA | 63 | C | 203 |
| 1173495 | 558975 | 558990 | 7964 | 7979 | ACTGATATGCAATCTA | 65 | C | 204 |
| 1173499 | 559458 | 559473 | 8447 | 8462 | GTACTTAATTCTTCCG | 98 | C | 205 |
| 1173503 | 559671 | 559686 | 8660 | 8675 | AAGTTTAAACCTGGTC | 85 | C | 206 |
| 1173506 | 559784 | 559799 | 8773 | 8788 | GTTACCTATTTACACT | 91 | C | 207 |
| 1173510 | 560025 | 560040 | 9014 | 9029 | TGAGACTATAGAGTTA | 92 | C | 208 |
| 1173514 | 560424 | 560439 | 9413 | 9428 | CCACTTTACTGTCCCC | 94 | C | 209 |
| 1173518 | 560794 | 560809 | 9783 | 9798 | AATTTGGTGGTCCACA | 75 | C | 210 |
| 1173522 | 561105 | 561120 | 10094 | 10109 | CATTTTAGTTCGGTTC | 70 | C | 211 |
| 1173526 | 561180 | 561195 | 10169 | 10184 | GGAATTGAAGTTAGGG | 58 | C | 212 |
| 1173530 | 561299 | 561314 | 10288 | 10303 | GTCCTTAATCGAGCCT | 92 | C | 213 |
| 1173534 | 561751 | 561766 | 10740 | 10755 | CTGCTAAGCTAGCACT | 100 | C | 214 |
| 1173538 | 561884 | 561899 | 10873 | 10888 | GGTAATCAAGGCTGAC | 65 | C | 215 |
| 1173542 | 561917 | 561932 | 10906 | 10921 | AGATACAAATTATCGC | 100 | C | 216 |
| 1173546 | 562076 | 562091 | 11065 | 11080 | GGACATATGGCACCAG | 80 | C | 217 |
| 1173550 | 562182 | 562197 | 11171 | 11186 | GTGTTATAGTACCGCC | 81 | C | 218 |
| 1173554 | 562456 | 562471 | 11445 | 11460 | CTTCTATACATATCAG | 81 | C | 219 |
| 1173558 | 13885 | 13900 | N/A | N/A | TCAATAAAAATACGGT | 110 | C | 220 |
| 1173562 | 32749 | 32764 | N/A | N/A | CTCTACTCTTGTTCAT | 96 | C | 221 |
| | 32788 | 32803 | | | | | | |
| 1173566 | 64282 | 64297 | N/A | N/A | GATTTTAACTTGCGGG | 92 | C | 222 |
| 1173570 | 82200 | 82215 | N/A | N/A | GATATTAGCTCATGGA | 29 | C | 223 |
| 1173574 | 124949 | 124964 | N/A | N/A | ATTTTTAAATGCGGCT | 67 | C | 224 |
| 1173578 | 133199 | 133214 | N/A | N/A | ATTAACAAAGGATCCA | 85 | C | 225 |
| 1173582 | 142021 | 142036 | N/A | N/A | GTAACTAAAGAGCTGG | 54 | C | 226 |
| 1173586 | 181272 | 181287 | N/A | N/A | CtATTTAATGGTTCCT | 32 | C | 227 |
| 1173590 | 199325 | 199340 | N/A | N/A | GTAATTACAAGTCACC | 112 | C | 228 |
| 1173594 | 225073 | 225088 | N/A | N/A | GTATTATTGACCTGGT | 23 | C | 229 |
| 1173598 | 243314 | 243329 | N/A | N/A | GAAATTAAAAGACGGC | 32 | C | 230 |
| 1173602 | 263020 | 263035 | N/A | N/A | GCTCATACCAAAGTGA | 67 | C | 231 |
| | 263102 | 263117 | | | | | | |
| 1173606 | 290259 | 290274 | N/A | N/A | GTAAATATGAGCCTCC | 47 | C | 232 |
| 1173610 | 316788 | 316803 | N/A | N/A | TGATATAAGGGTCCTA | 65 | C | 233 |
| 1173614 | 332850 | 332865 | N/A | N/A | ATTCAGCCTAACAGGC | 93 | C | 234 |
| | 338128 | 338143 | | | | | | |
| 1173618 | 332936 | 332951 | N/A | N/A | TAAGTTGCTTGGCCAA | 54 | C | 235 |
| | 338214 | 338229 | | | | | | |
| 1173622 | 333003 | 333018 | N/A | N/A | TTCTCCTAACCGCTCT | 45 | C | 236 |
| | 338281 | 338296 | | | | | | |
| 1173626 | 333050 | 333065 | N/A | N/A | CCACACGGGCACACTG | 49 | C | 237 |
| | 338328 | 338343 | | | | | | |
| 1173630 | 333092 | 333107 | N/A | N/A | GCCCAGCGACTTCCAT | 80 | C | 238 |
| | 338370 | 338385 | | | | | | |
| 1173634 | 333150 | 333165 | N/A | N/A | GAAATGATCACCCGGA | 44 | C | 239 |
| | 338428 | 338443 | | | | | | |
| 1173638 | 333294 | 333309 | N/A | N/A | AACAACTTCTGGAGCA | 72 | C | 240 |
| | 338572 | 338587 | | | | | | |
| 1173642 | 333393 | 333408 | N/A | N/A | CAAGATCACCCTGTGA | 111 | C | 241 |
| | 338671 | 338686 | | | | | | |
| 1173646 | 347111 | 347126 | N/A | N/A | GTAATTAGTTAATCTT | 72 | C | 242 |
| 1173650 | 353385 | 353400 | N/A | N/A | GCTGTAGTTCAACTCC | 47 | C | 243 |
| | 354805 | 354820 | | | | | | |
| 1173654 | 376319 | 376334 | N/A | N/A | GATAGTAAGGATCAGT | 78 | C | 244 |
| 1173658 | 390453 | 390468 | N/A | N/A | CTTATATTGAATGAGT | 82 | C | 245 |
| 1173662 | 398647 | 398662 | N/A | N/A | GCAGAACAAAGACGGC | 84 | C | 246 |
| 1173666 | 434509 | 434524 | N/A | N/A | TCTGGGTTTACTTGTA | 67 | C | 247 |
| | 434551 | 434566 | | | | | | |
| 1173670 | 462706 | 462721 | N/A | N/A | AGGAGTTTAGTGATGC | 55 | C | 248 |
| | 462733 | 462748 | | | | | | |
| 1173674 | 482706 | 482721 | N/A | N/A | GCAGAATAGTTATCTA | 73 | C | 249 |
| 1173678 | 505610 | 505625 | N/A | N/A | GTAATTACAAGGCTCT | 70 | C | 250 |
| 1173682 | 520356 | 520371 | N/A | N/A | CCATTTAAGTTTTCGG | 84 | C | 251 |
| 1173686 | 536558 | 536573 | N/A | N/A | AATACTAAGGTTTCTC | 71 | C | 252 |
| 1173690 | 550902 | 550917 | N/A | N/A | GATTTTACTGAACCAA | 67 | C | 253 |
| 1173172 | 559744 | 559759 | 8733 | 8748 | ACAACTAAGGCCAGTG | 79 | D | 254 |
| 1173385 | 217576 | 217591 | 542 | 557 | CCTGTAATGTTCCGGA | 46 | D | 255 |
| 1173389 | 217982 | 217997 | 948 | 963 | CTTCGATCACATCCCC | 46 | D | 256 |
| 1173392 | 221983 | 221998 | 1393 | 1408 | CTCCGTATATCCAGGC | 71 | D | 257 |
| 1173396 | 222142 | 222157 | 1552 | 1567 | TTCTTTAATGCGCTGT | 32 | D | 258 |
| 1173400 | 222271 | 222286 | 1681 | 1696 | GGAGTCGCTGGCATCA | 69 | D | 259 |
| 1173404 | 288680 | 288695 | 2075 | 2090 | ATCTATTGGAGAAGTG | 4 | D | 260 |
| 1173408 | 324490 | 324505 | 2213 | 2228 | GATTTGCAATGAACTC | 39 | D | 261 |
| 1173412 | 457284 | 457299 | 2409 | 2424 | AATGGGTTAGTAGTAC | 61 | D | 262 |
| 1173416 | 533770 | 533785 | 3009 | 3024 | TCCAGATAGTGGTCTT | 92 | D | 263 |
| 1173420 | 554158 | 554173 | 3147 | 3162 | GGAGAAGTATCCGGGT | 87 | D | 264 |
| 1173424 | 554364 | 554379 | 3353 | 3368 | ATTACTAATGCACCGT | 72 | D | 265 |
| 1173428 | 554494 | 554509 | 3483 | 3498 | TGAAATCACGATCCCC | 71 | D | 266 |
| 1173432 | 554673 | 554688 | 3662 | 3677 | CGTATATTAACTCCAG | 65 | D | 267 |
| 1173436 | 554775 | 554790 | 3764 | 3779 | TCATATTGGAGCAACT | 97 | D | 268 |
| 1173440 | 554886 | 554901 | 3875 | 3890 | AAGCTAATGTGCTTCC | 135 | D | 269 |
| 1173444 | 555066 | 555081 | 4055 | 4070 | GTAACAATTCCTGCAG | 90 | D | 270 |
| 1173448 | 555808 | 555823 | 4797 | 4812 | CATAGTACCTTCAACA | 72 | D | 271 |
| 1173452 | 556169 | 556184 | 5158 | 5173 | TCTGATACATGGGCCA | 81 | D | 272 |
| 1173456 | 556244 | 556259 | 5233 | 5248 | TTTAGATTATCAGGTA | 91 | D | 273 |
| 1173460 | 556395 | 556410 | 5384 | 5399 | ACATAGATATAGACTG | 62 | D | 274 |
| 1173464 | 556516 | 556531 | 5505 | 5520 | GTGCTATAGTGGTGCT | 76 | D | 275 |
| 1173468 | 556576 | 556591 | 5565 | 5580 | ATCTATTAGCCTATCC | 54 | D | 276 |
| 1173472 | 556794 | 556809 | 5783 | 5798 | AGCATAAACTCTTGGC | 82 | D | 277 |
| 1173476 | 557315 | 557330 | 6304 | 6319 | TCAGAAATGCCTACGG | 50 | D | 278 |
| 1173480 | 557746 | 557761 | 6735 | 6750 | GCAGTAAGAGGCCTCT | 79 | D | 279 |
| 1173484 | 558216 | 558231 | 7205 | 7220 | CTTAGGATGCCACTTT | 71 | D | 280 |
| 1173488 | 558499 | 558514 | 7488 | 7503 | AATAATCTATCACGGG | 57 | D | 281 |
| 1173492 | 558619 | 558634 | 7608 | 7623 | TCTGGATACTGTAGGT | 64 | D | 282 |
| 1173496 | 559046 | 559061 | 8035 | 8050 | ATGAGGTTGTACTTGC | 55 | D | 283 |
| 1173500 | 559568 | 559583 | 8557 | 8572 | TACTTTAGTGCTTGTG | 88 | D | 284 |
| 1173507 | 559907 | 559922 | 8896 | 8911 | AGCTACAAAGACACGA | 78 | D | 285 |
| 1173511 | 560128 | 560143 | 9117 | 9132 | GGAAATACTCTCGCAA | 69 | D | 286 |
| 1173515 | 560429 | 560444 | 9418 | 9433 | AGCAACCACTTTACTG | 69 | D | 287 |
| 1173519 | 560846 | 560861 | 9835 | 9850 | GCTACGGAGAGATGCT | 76 | D | 288 |
| 1173523 | 561106 | 561121 | 10095 | 10110 | GCATTTTAGTTCGGTT | 63 | D | 289 |
| 1173527 | 561250 | 561265 | 10239 | 10254 | TTATTTATGGCGACCG | 64 | D | 290 |
| 1173531 | 561369 | 561384 | 10358 | 10373 | TGTTATCACCACTCTC | 96 | D | 291 |
| 1173535 | 561788 | 561803 | 10777 | 10792 | GCCTTTACCTAACAGC | 84 | D | 292 |
| 1173539 | 561913 | 561928 | 10902 | 10917 | ACAAATTATCGCCTTT | 88 | D | 293 |
| 1173543 | 561961 | 561976 | 10950 | 10965 | TATTATAATAGGCTGG | 88 | D | 294 |
| 1173547 | 562153 | 562168 | 11142 | 11157 | CTGCTAATGCCGACAG | 76 | D | 295 |
| 1173551 | 562198 | 562213 | 11187 | 11202 | AACAGGTTTCCAGTAC | 93 | D | 296 |
| 1173555 | 562471 | 562486 | 11460 | 11475 | CTCTATATATCACAGC | 91 | D | 297 |
| 1173559 | 17940 | 17955 | N/A | N/A | TGCACATAACTTCACT | 123 | D | 298 |
| | 274222 | 274237 | | | | | | |
| 1173563 | 45763 | 45778 | N/A | N/A | CTTATTTAGGCCCTCA | 133 | D | 299 |
| 1173567 | 65073 | 65088 | N/A | N/A | ATAAGTAAAGTGTCTG | 97 | D | 300 |
| 1173571 | 95035 | 95050 | N/A | N/A | CTTTTTAAGTACCGCG | 41 | D | 301 |
| 1173575 | 126046 | 126061 | N/A | N/A | GTAATTTAGCCCCAGT | 50 | D | 302 |
| 1173579 | 133482 | 133497 | N/A | N/A | TATATTTAGTTGGTAG | 47 | D | 303 |
| 1173583 | 145334 | 145349 | N/A | N/A | GTAACGAATTATTACG | 641 | D | 304 |
| 1173587 | 185170 | 185185 | N/A | N/A | ATTAACATAAGACTGT | 53 | D | 305 |
| 1173591 | 207617 | 207632 | N/A | N/A | GATATTAGAGCCAGTT | 64 | D | 306 |
| 1173595 | 225892 | 225907 | N/A | N/A | TTAAGTAAATCTAGGC | 32 | D | 307 |
| 1173599 | 249394 | 249409 | N/A | N/A | ATTATTAGTATGTCCA | 18 | D | 308 |
| 1173603 | 271179 | 271194 | N/A | N/A | TATATTAGTGACAGTC | 19 | D | 309 |
| 1173607 | 305747 | 305762 | N/A | N/A | TTATTTAATATACGGT | 69 | D | 310 |
| 1173611 | 322667 | 322682 | N/A | N/A | GATTTTTAGGTTCCGT | 42 | D | 311 |
| 1173615 | 332856 | 332871 | N/A | N/A | CATGACATTCAGCCTA | 66 | D | 312 |
| | 338134 | 338149 | | | | | | |
| 1173619 | 332966 | 332981 | N/A | N/A | CATGCCGTACCTGAGA | 57 | D | 313 |
| | 338244 | 338259 | | | | | | |
| 1173623 | 333027 | 333042 | N/A | N/A | CTTAACACACCTCATC | 97 | D | 314 |
| | 338305 | 338320 | | | | | | |
| 1173627 | 333064 | 333079 | N/A | N/A | ACAACTAGTGCATTCC | 43 | D | 315 |
| | 338342 | 338357 | | | | | | |
| 1173631 | 333099 | 333114 | N/A | N/A | GCTTAGAGCCCAGCGA | 74 | D | 316 |
| | 338377 | 338392 | | | | | | |
| 1173635 | 333228 | 333243 | N/A | N/A | GCCTAAACCGAAAACC | 100 | D | 317 |
| | 338506 | 338521 | | | | | | |
| 1173639 | 333321 | 333336 | N/A | N/A | GGAAGTTAGAACATGA | 48 | D | 318 |
| | 338599 | 338614 | | | | | | |
| 1173643 | 333398 | 333413 | N/A | N/A | CCTTACAAGATCACCC | 68 | D | 319 |
| | 338676 | 338691 | | | | | | |
| 1173647 | 353230 | 353245 | N/A | N/A | CATAGAAGTAATCTTC | 80 | D | 320 |
| | 354645 | 354660 | | | | | | |
| 1173651 | 353457 | 353472 | N/A | N/A | ACATTCAGTAAGAGTT | 86 | D | 321 |
| | 354877 | 354892 | | | | | | |
| 1173655 | 377931 | 377946 | N/A | N/A | ATTACGAAGTTCTCTG | 96 | D | 322 |
| 1173659 | 394789 | 394804 | N/A | N/A | GTAATATTGAGATCAC | 58 | D | 323 |
| 1173663 | 403696 | 403711 | N/A | N/A | GTAATATTGCAATCCC | 77 | D | 324 |
| 1173667 | 443967 | 443982 | N/A | N/A | TTTACCAAGAGTCCAG | 54 | D | 325 |
| | 444361 | 444376 | | | | | | |
| 1173671 | 467649 | 467664 | N/A | N/A | CAAATTACTTCTCCGA | 69 | D | 326 |
| 1173675 | 487429 | 487444 | N/A | N/A | GTATTTAGTTGGTGTG | 80 | D | 327 |
| 1173679 | 507704 | 507719 | N/A | N/A | TTATCGATAATTTCCT | 77 | D | 328 |
| 1173683 | 524076 | 524091 | N/A | N/A | ATCGCTAAACATCCTA | 46 | D | 329 |
| 1173687 | 539374 | 539389 | N/A | N/A | ATTAACTTAGGTGGGC | 81 | D | 330 |
| 1173691 | 552751 | 552766 | N/A | N/A | GATAACTTACCATCCC | 92 | D | 331 |

TABLE 2
Reduction of PSD3 RNA by 3-10-3 cEt modified oligonucleotides with uniform phosphorothioate
internucleoside linkages

| | SEQ | SEQ | SEQ | SEQ | | | | |
|---|---|---|---|---|---|---|---|---|
| | ID | ID | ID | ID | | | | |
| | NO: 1 | NO: 1 | NO: 2 | NO: 2 | | PSD3(% | | SEQ |
| Compound | Start | Stop | Start | Stop | | UTC) | | ID |
| No. | Site | Site | Site | Site | Sequence (5′ to 3′) | RTS41435 | AID | NO |
| 1173403 | 288679 | 288694 | 2074 | 2089 | TCTATTGGAGAAGTGT | 7 | E | 181 |
| 1173403 | 288679 | 288694 | 2074 | 2089 | TCTATTGGAGAAGTGT | 5 | F | 181 |
| 1173403 | 288679 | 288694 | 2074 | 2089 | TCTATTGGAGAAGTGT | 3 | G | 181 |
| 1173403 | 288679 | 288694 | 2074 | 2089 | TCTATTGGAGAAGTGT | 4 | H | 181 |
| 1173403 | 288679 | 288694 | 2074 | 2089 | TCTATTGGAGAAGTGT | 4 | I | 181 |
| 1173404 | 288680 | 288695 | 2075 | 2090 | ATCTATTGGAGAAGTG | 4 | I | 260 |
| 1408351 | 225893 | 225908 | N/A | N/A | TTTAAGTAAATCTAGG | 61 | I | 332 |
| 1408352 | 225891 | 225906 | N/A | N/A | TAAGTAAATCTAGGCA | 20 | I | 333 |
| 1408353 | 235212 | 235227 | N/A | N/A | TTATACACAATTTAGC | 28 | I | 334 |
| | 235285 | 235300 | | | | | | |
| 1408354 | 235211 | 235226 | N/A | N/A | TATACACAATTTAGCT | 37 | I | 335 |
| | 235284 | 235299 | | | | | | |
| 1408355 | 217985 | 218000 | 951 | 966 | CTGCTTCGATCACATC | 16 | I | 336 |
| 1408356 | 235210 | 235225 | N/A | N/A | ATACACAATTTAGCTC | 7 | I | 337 |
| | 235283 | 235298 | | | | | | |
| 1408357 | 235281 | 235296 | N/A | N/A | ACACAATTTAGCTCTG | 4 | I | 338 |
| 1408358 | 235280 | 235295 | N/A | N/A | CACAATTTAGCTCTGT | 21 | I | 339 |
| 1408359 | 235279 | 235294 | N/A | N/A | ACAATTTAGCTCTGTT | 49 | I | 340 |
| 1408360 | 235208 | 235223 | N/A | N/A | ACACAATTTAGCTCTA | 4 | I | 341 |
| 1408361 | 235207 | 235222 | N/A | N/A | CACAATTTAGCTCTAT | 7 | I | 342 |
| 1408362 | 235206 | 235221 | N/A | N/A | ACAATTTAGCTCTATT | 18 | I | 343 |
| 1408363 | 243317 | 243332 | N/A | N/A | GCAGAAATTAAAAGAC | 27 | I | 344 |
| 1408364 | 243316 | 243331 | N/A | N/A | CAGAAATTAAAAGACG | 51 | I | 345 |
| 1408365 | 217666 | 217681 | 632 | 647 | TCTGTGTTTTACGACT | 8 | I | 346 |
| 1408366 | 222147 | 222162 | 1557 | 1572 | CCACCTTCTTTAATGC | 11 | I | 347 |
| 1408368 | 222137 | 222152 | 1547 | 1562 | TAATGCGCTGTTGTAT | 11 | I | 348 |
| 1408369 | 288684 | 288699 | 2079 | 2094 | AAATATCTATTGGAGA | 30 | I | 349 |
| 1408370 | 288674 | 288689 | 2069 | 2084 | TGGAGAAGTGTATTAA | 5 | I | 350 |
| 1408371 | 288685 | 288700 | 2080 | 2095 | AAAATATCTATTGGAG | 14 | I | 351 |
| 1408372 | 288675 | 288690 | 2070 | 2085 | TTGGAGAAGTGTATTA | 6 | I | 352 |
| 1408373 | 290672 | 290687 | 2151 | 2166 | TTAAGAAGCATTATTG | 80 | I | 353 |
| 1408374 | 290684 | 290699 | 2163 | 2178 | TGTAGATCGGTATTAA | 26 | I | 354 |
| 1408375 | 82205 | 82220 | N/A | N/A | TTTCAGATATTAGCTC | 6 | I | 355 |
| 1408376 | 82195 | 82210 | N/A | N/A | TAGCTCATGGAAAGCA | 70 | I | 356 |
| 1408377 | 181277 | 181292 | N/A | N/A | ATCTTCTATTTAATGG | 36 | I | 357 |
| 1408378 | 217656 | 217671 | 622 | 637 | ACGACTGGCAGTGTCC | 36 | I | 358 |
| 1408379 | 188563 | 188578 | N/A | N/A | CAAGGGTATTATTGAT | 46 | I | 359 |
| 1408380 | 188553 | 188568 | N/A | N/A | ATTGATAGGCGAGAAC | 53 | I | 360 |
| 1408381 | 189833 | 189848 | N/A | N/A | CTAAAATTATCGAACC | 64 | I | 361 |
| 1408382 | 189823 | 189838 | N/A | N/A | CGAACCATCTTTTGCT | 70 | I | 362 |
| 1408383 | 225078 | 225093 | N/A | N/A | CGTGTGTATTATTGAC | 6 | I | 363 |
| 1408384 | 225068 | 225083 | N/A | N/A | ATTGACCTGGTAAATT | 66 | I | 364 |
| 1408385 | 217988 | 218003 | 954 | 969 | GAGCTGCTTCGATCAC | 19 | I | 365 |
| 1408386 | 225897 | 225912 | N/A | N/A | AGGATTTAAGTAAATC | 95 | I | 366 |
| 1408387 | 225887 | 225902 | N/A | N/A | TAAATCTAGGCAATAG | 61 | I | 367 |
| 1408388 | 235277 | 235292 | N/A | N/A | AATTTAGCTCTGTTAA | 41 | I | 368 |
| 1408389 | 235204 | 235219 | N/A | N/A | AATTTAGCTCTATTAA | 70 | I | 369 |
| 1408390 | 243319 | 243334 | N/A | N/A | GTGCAGAAATTAAAAG | 58 | I | 370 |
| 1408391 | 243309 | 243324 | N/A | N/A | TAAAAGACGGCCTCTG | 46 | I | 371 |
| 1408392 | 249399 | 249414 | N/A | N/A | TAGGTATTATTAGTAT | 29 | I | 372 |
| 1408393 | 249389 | 249404 | N/A | N/A | TAGTATGTCCACCTGG | 22 | I | 373 |
| 1408394 | 263014 | 263029 | N/A | N/A | ACCAAAGTGATATGAA | 12 | I | 374 |
| | 263055 | 263070 | | | | | | |
| 1408395 | 263045 | 263060 | N/A | N/A | TATGAATGGTATGATA | 62 | I | 375 |
| 1408396 | 263004 | 263019 | N/A | N/A | TATGAATGGTATGATG | 55 | I | 376 |
| 1408397 | 271184 | 271199 | N/A | N/A | AATCTTATATTAGTGA | 62 | I | 377 |
| 1408398 | 271174 | 271189 | N/A | N/A | TAGTGACAGTCAGAAC | 39 | I | 378 |
| 1408399 | 217978 | 217993 | 944 | 959 | GATCACATCCCCCTGG | 73 | I | 379 |
| 1408405 | 218087 | 218102 | 1053 | 1068 | AAATCTATAGGATGCT | 12 | I | 380 |
| 1408411 | 218077 | 218092 | 1043 | 1058 | GATGCTGGGTCTCTCT | 14 | I | 381 |
| 1411079 | 88242 | 88257 | N/A | N/A | TCAGAGAAGGAAGGTA | 26 | I | 382 |
| 1411093 | 88246 | 88261 | N/A | N/A | GGGCTCAGAGAAGGAA | 87 | I | 383 |
| 1411096 | 88245 | 88260 | N/A | N/A | GGCTCAGAGAAGGAAG | 68 | I | 384 |
| 1411181 | 88238 | 88253 | N/A | N/A | AGAAGGAAGGTATTCA | 88 | I | 385 |
| 1411183 | 94388 | 94403 | N/A | N/A | CAGGCTGCTATTAAAG | 68 | I | 386 |
| 1411191 | 94382 | 94397 | N/A | N/A | GCTATTAAAGACATGC | 73 | I | 387 |
| 1411214 | 94389 | 94404 | N/A | N/A | TCAGGCTGCTATTAAA | 42 | I | 388 |
| 1411226 | 88241 | 88256 | N/A | N/A | CAGAGAAGGAAGGTAT | 30 | I | 389 |
| 1411227 | 94392 | 94407 | N/A | N/A | TTCTCAGGCTGCTATT | 66 | I | 390 |
| 1411308 | 88240 | 88255 | N/A | N/A | AGAGAAGGAAGGTATT | 46 | I | 391 |
| 1411346 | 88244 | 88259 | N/A | N/A | GCTCAGAGAAGGAAGG | 45 | I | 392 |
| 1411391 | 94386 | 94401 | N/A | N/A | GGCTGCTATTAAAGAC | 73 | I | 393 |
| 1411414 | 88248 | 88263 | N/A | N/A | CCGGGCTCAGAGAAGG | 71 | I | 394 |
| 1411416 | 94390 | 94405 | N/A | N/A | CTCAGGCTGCTATTAA | 56 | I | 395 |
| 1173403 | 288679 | 288694 | 2074 | 2089 | TCTATTGGAGAAGTGT | 3 | J | 181 |
| 1408263 | 271178 | 271193 | N/A | N/A | ATATTAGTGACAGTCA | 17 | J | 396 |
| 1408296 | 218079 | 218094 | 1045 | 1060 | AGGATGCTGGGTCTCT | 7 | J | 397 |
| 1408346 | 225071 | 225086 | N/A | N/A | ATTATTGACCTGGTAA | 41 | J | 398 |
| 1408572 | 217621 | 217636 | 587 | 602 | GAACTGAAAAACTAGA | 28 | J | 399 |
| 1408578 | 290577 | 290592 | N/A | N/A | ACCTTATTATCACTAA | 69 | J | 400 |
| 1408584 | 290749 | 290764 | N/A | N/A | TAAAAGCAGAGATAAG | 86 | J | 401 |
| 1408599 | 82210 | 82225 | N/A | N/A | GATACTTTCAGATATT | 51 | J | 402 |
| 1408620 | 189948 | 189963 | N/A | N/A | CAGATATCCATTCTTC | 57 | J | 403 |
| 1408661 | 235236 | 235251 | N/A | N/A | CAAAATAGATTTAAGT | 113 | J | 404 |
| | 235309 | 235324 | | | | | | |
| 1408704 | 262970 | 262985 | N/A | N/A | ACCAATATTAATGTCA | 9 | J | 405 |
| 1408711 | 263159 | 263174 | N/A | N/A | ACCTTTCAAATGTACT | 47 | J | 406 |
| 1409134 | 61016 | 61031 | N/A | N/A | GACCATTATATATGTG | 86 | J | 407 |
| 1409143 | 522999 | 523014 | N/A | N/A | TAGTATACAGTCCCTA | 70 | J | 408 |
| 1409154 | 229864 | 229879 | N/A | N/A | CAATATTGTGTGTCTC | 12 | J | 409 |
| 1409241 | 193663 | 193678 | N/A | N/A | GATATATACCAAGTGG | 14 | J | 410 |
| 1409258 | 558641 | 558656 | 7630 | 7645 | GCAGAAGGCTGCCCAC | 54 | J | 411 |
| 1409277 | 206184 | 206199 | N/A | N/A | TATAGTTCATCGGATT | 61 | J | 412 |
| 1409286 | 300320 | 300335 | N/A | N/A | ACCTAACTCACTGTCA | 67 | J | 413 |
| 1409289 | 155902 | 155917 | N/A | N/A | AGTTATTATATGGCTG | 16 | J | 414 |
| 1409294 | 419952 | 419967 | N/A | N/A | GACGATAATTCTGTCA | 76 | J | 415 |
| 1409316 | 202276 | 202291 | N/A | N/A | GACAATACAAACCACT | 43 | J | 416 |
| 1409326 | 342926 | 342941 | N/A | N/A | GATAATGTGAAGCTTA | 3 | J | 417 |
| 1409413 | 142097 | 142112 | N/A | N/A | GTAATAAAGCCTCCCA | 51 | J | 418 |
| 1409442 | 9709 | 9724 | N/A | N/A | AGGTAGAAAGATTTCC | 103 | J | 419 |
| 1409453 | 288860 | 288875 | N/A | N/A | GACTAGAATGAAGTAA | 44 | J | 420 |
| 1409456 | 204092 | 204107 | N/A | N/A | AAAGATTCTATCTCAG | 62 | J | 421 |
| 1409478 | 274368 | 274383 | N/A | N/A | TCAAATTCTTACGACA | 47 | J | 422 |
| 1409495 | 222028 | 222043 | 1438 | 1453 | GTCCAAAATGGTTTCA | 7 | J | 423 |
| 1409509 | 211638 | 211653 | N/A | N/A | ACATACCAGATCATGT | 91 | J | 424 |
| 1409513 | 198418 | 198433 | N/A | N/A | CCTAGAAAAGTCATCT | 64 | J | 425 |
| 1409530 | 226629 | 226644 | N/A | N/A | TCTAATTTTGGAGCCA | 51 | J | 426 |
| 1409565 | 267539 | 267554 | N/A | N/A | GACAAACATACTCTTA | 21 | J | 427 |
| 1409614 | 458772 | 458787 | N/A | N/A | ATGTATGAAGAAGGGT | 6 | J | 428 |
| 1409683 | 537898 | 537913 | N/A | N/A | ACATTAGGTGGGCTGG | 34 | J | 429 |
| 1409690 | 259410 | 259425 | N/A | N/A | GTATCAAAGTACACTT | 32 | J | 430 |
| 1409734 | 292710 | 292725 | N/A | N/A | CCTGAATATGACAGAG | 11 | J | 431 |
| 1409740 | 127337 | 127352 | N/A | N/A | GAAGTTTAAATACCTC | 108 | J | 432 |
| 1409847 | 471937 | 471952 | N/A | N/A | ATTATTTAGAGACTTC | 48 | J | 433 |
| 1409910 | 282175 | 282190 | N/A | N/A | CTTAACATTACATGGC | 31 | J | 434 |
| 1409923 | 248800 | 248815 | N/A | N/A | ACTAATTGGATGGCTT | 9 | J | 435 |
| 1409941 | 401272 | 401287 | N/A | N/A | TCACAACTAGATTCAA | 16 | J | 436 |
| 1410005 | 187684 | 187699 | N/A | N/A | ACTGATTGAATTCTTC | 30 | J | 437 |
| 1410031 | 251702 | 251717 | N/A | N/A | AATTACCTAAAGGTCA | 64 | J | 438 |
| 1410049 | 278814 | 278829 | N/A | N/A | AGGGATTGAATTGTCA | 16 | J | 439 |
| 1410085 | 452911 | 452926 | N/A | N/A | GCAATATATTGATTTG | 59 | J | 440 |
| 1410093 | 365698 | 365713 | N/A | N/A | GTAATATTAAAGCCAG | 5 | J | 441 |
| 1410144 | 436706 | 436721 | N/A | N/A | CACTATAGTGTCTTCT | 39 | J | 442 |
| 1410166 | 220197 | 220212 | N/A | N/A | GAACCTAGCACACTTT | 72 | J | 443 |
| 1410193 | 508289 | 508304 | N/A | N/A | GATTTTAAGAGTCCAC | 1 | J | 444 |
| 1410215 | 95573 | 95588 | N/A | N/A | AGCAAATCATGTGTTG | 7 | J | 445 |
| 1410240 | 233327 | 233342 | N/A | N/A | CTTCTAAATAGAGTAA | 52 | J | 446 |
| 1410246 | 180706 | 180721 | N/A | N/A | AAGGTTTGACCGTGGC | 26 | J | 447 |
| 1410258 | 188939 | 188954 | N/A | N/A | GTGTATATAAGTTTTG | 13 | J | 448 |
| 1410297 | 181927 | 181942 | N/A | N/A | GAATTGATAACAGGTA | 4 | J | 449 |
| 1410317 | 108279 | 108294 | N/A | N/A | GTCTATTAACTGTGGA | 34 | J | 450 |
| 1410322 | 308572 | 308587 | N/A | N/A | CCCTATTAAATGTTCC | 61 | J | 451 |
| 1410369 | 208712 | 208727 | N/A | N/A | ATTAAGTAGTCATCTG | 45 | J | 452 |
| 1410384 | 388078 | 388093 | N/A | N/A | GAAATACTATGTTCAC | 45 | J | 453 |
| 1410400 | 490657 | 490672 | N/A | N/A | ACCATATGGAGTTTCT | 32 | J | 454 |
| 1410436 | 244765 | 244780 | N/A | N/A | GGTAATTTATGAGTTA | 8 | J | 455 |
| 1410485 | 553016 | 553031 | N/A | N/A | GCAAATTCTGTTTTGA | 42 | J | 456 |
| 1410531 | 215893 | 215908 | N/A | N/A | AAATACAGTGTACTCA | 68 | J | 457 |
| 1410565 | 255337 | 255352 | N/A | N/A | GTCACATAAAGTAGGG | 51 | J | 458 |
| 1410590 | 240211 | 240226 | N/A | N/A | AAGGTAAACTTTTCTC | 40 | J | 459 |
| 1411112 | 560514 | 560529 | 9503 | 9518 | TCCTTATACACCTAAG | 14 | J | 460 |
| 1411113 | 285152 | 285167 | 1787 | 1802 | CCAAAATTTCAGTGCT | 8 | J | 461 |
| 1411145 | N/A | N/A | 2005 | 2020 | GAAATACCTGAGTGAC | 5 | J | 462 |
| 1411146 | 557368 | 557383 | 6357 | 6372 | TTTAATTAGACACTGC | 7 | J | 463 |
| 1411173 | 556445 | 556460 | 5434 | 5449 | TACCATTCAATGTATA | 21 | J | 464 |
| 1411184 | 562018 | 562033 | 11007 | 11022 | GGTAAAGAAATGTTCC | 45 | J | 465 |
| 1411193 | 555858 | 555873 | 4847 | 4862 | TCTAATTCACTGGAAC | 74 | J | 466 |
| 1411301 | 559824 | 559839 | 8813 | 8828 | AATATACCAAACATGC | 54 | J | 467 |
| 1411361 | N/A | N/A | 2180 | 2195 | TTCCAATATTGTGGCC | 44 | J | 468 |
| 1411362 | 222159 | 222174 | 1569 | 1584 | TCCAAGAACTGACCAC | 4 | J | 469 |
| 1411404 | 559425 | 559440 | 8414 | 8429 | GGACTAATTACAACAA | 10 | J | 470 |
| 1411426 | 554650 | 554665 | 3639 | 3654 | TTACTAAAACTACAGT | 97 | J | 471 |
| 1411435 | 559091 | 559106 | 8080 | 8095 | TACCACTATATATACT | 39 | J | 472 |
| 1173403 | 288679 | 288694 | 2074 | 2089 | TCTATTGGAGAAGTGT | 5 | K | 181 |
| 1408262 | 271180 | 271195 | N/A | N/A | TTATATTAGTGACAGT | 30 | K | 473 |
| 1408293 | 218080 | 218095 | 1046 | 1061 | TAGGATGCTGGGTCTC | 12 | K | 474 |
| 1408338 | 217658 | 217673 | 624 | 639 | TTACGACTGGCAGTGT | 10 | K | 475 |
| 1408345 | 225072 | 225087 | N/A | N/A | TATTATTGACCTGGTA | 17 | K | 476 |
| 1408548 | 288629 | 288644 | 2024 | 2039 | CAAGAGAGAATGCTTT | 71 | K | 477 |
| 1408566 | 290757 | 290772 | N/A | N/A | TTTGAACATAAAAGCA | 56 | K | 478 |
| 1408577 | 290597 | 290612 | N/A | N/A | GCTTTTCACTGTTGGA | 28 | K | 479 |
| 1408598 | 82240 | 82255 | N/A | N/A | TAATAATATCTGTACT | 87 | K | 480 |
| 1408655 | 235249 | 235264 | N/A | N/A | CTGAAATAGACAACAA | 19 | K | 481 |
| | 235322 | 235337 | | | | | | |
| 1408694 | 263160 | 263175 | N/A | N/A | TACCTTTCAAATGTAC | 90 | K | 482 |
| 1408722 | 262999 | 263014 | N/A | N/A | ATGGTATGATGGTTCT | 12 | K | 483 |
| 1409126 | 274734 | 274749 | N/A | N/A | TCCAAATTTTACCATC | 10 | K | 484 |
| 1409135 | 180803 | 180818 | N/A | N/A | ATTAATTTGCTTGGGT | 21 | K | 485 |
| 1409163 | 206217 | 206232 | N/A | N/A | GCACTAAGGGTCTTAT | 38 | K | 486 |
| 1409183 | 388404 | 388419 | N/A | N/A | CATTTAAGTGAAGTCT | 19 | K | 487 |
| 1409215 | 244766 | 244781 | N/A | N/A | AGGTAATTTATGAGTT | 9 | K | 488 |
| 1409220 | 189161 | 189176 | N/A | N/A | TTTACTGGACAGATGA | 28 | K | 489 |
| 1409230 | 523004 | 523019 | N/A | N/A | CTTACTAGTATACAGT | 66 | K | 490 |
| 1409291 | 190141 | 190156 | N/A | N/A | ATTTATAGACAAGGGC | 12 | K | 491 |
| 1409315 | 401303 | 401318 | N/A | N/A | CCACAATCATGGTGTT | 65 | K | 492 |
| 1409345 | 282374 | 282389 | N/A | N/A | TCAATATCAATGGCAG | 7 | K | 493 |
| 1409414 | 128224 | 128239 | N/A | N/A | GATATTTTATTTGTCC | 60 | K | 494 |
| 1409474 | 109177 | 109192 | N/A | N/A | CTATTTACACCCTTCA | 34 | K | 495 |
| 1409479 | 215894 | 215909 | N/A | N/A | GAAATACAGTGTACTC | 43 | K | 496 |
| 1409543 | 233376 | 233391 | N/A | N/A | AATATTACTCTTGACA | 25 | K | 497 |
| 1409561 | 255721 | 255736 | N/A | N/A | GATTACATGGCAACAC | 21 | K | 498 |
| 1409581 | 292724 | 292739 | N/A | N/A | ACCAAACACATGATCC | 26 | K | 499 |
| 1409618 | 289503 | 289518 | N/A | N/A | GAATCTAGTCTCAGTG | 40 | K | 500 |
| 1409648 | 539533 | 539548 | N/A | N/A | TGTAATACAGAATCTC | 14 | K | 501 |
| 1409649 | 202308 | 202323 | N/A | N/A | ATATTTCCAACCAGTA | 35 | K | 502 |
| 1409661 | 198422 | 198437 | N/A | N/A | ATGACCTAGAAAAGTC | 109 | K | 503 |
| 1409675 | 259413 | 259428 | N/A | N/A | CAGGTATCAAAGTACA | 15 | K | 504 |
| 1409699 | 308869 | 308884 | N/A | N/A | GCCAAAGTAATTCCAT | 70 | K | 505 |
| 1409736 | 240215 | 240230 | N/A | N/A | GTCTAAGGTAAACTTT | 33 | K | 506 |
| 1409742 | 508658 | 508673 | N/A | N/A | GTAATAATTAACTACC | 78 | K | 507 |
| 1409761 | 204094 | 204109 | N/A | N/A | GTAAAGATTCTATCTC | 75 | K | 508 |
| 1409764 | 267777 | 267792 | N/A | N/A | GAAACTTTGGTTGAGA | 12 | K | 509 |
| 1409806 | 226630 | 226645 | N/A | N/A | TTCTAATTTTGGAGCC | 57 | K | 510 |
| 1409837 | 553189 | 553204 | N/A | N/A | TATCATATATGTTGCA | 38 | K | 511 |
| 1409871 | 248880 | 248895 | N/A | N/A | CAAGTTTACAACCCAA | 21 | K | 512 |
| 1409876 | 211639 | 211654 | N/A | N/A | TACATACCAGATCATG | 84 | K | 513 |
| 1409898 | 62310 | 62325 | N/A | N/A | CTGTATTAATAGATTC | 90 | K | 514 |
| 1409899 | 208720 | 208735 | N/A | N/A | GGTTATATATTAAGTA | 58 | K | 515 |
| 1409911 | 300331 | 300346 | N/A | N/A | AAGATAAACACACCTA | 73 | K | 516 |
| 1409935 | 453170 | 453185 | N/A | N/A | CATATAGTACACATGA | 91 | K | 517 |
| 1409946 | 366240 | 366255 | N/A | N/A | ATCATATGAAAGCCAA | 5 | K | 518 |
| 1409980 | 95593 | 95608 | N/A | N/A | AACCATATATGCCTCA | 12 | K | 519 |
| 1410004 | 10808 | 10823 | N/A | N/A | GCAAATCACAAGATGA | 92 | K | 520 |
| 1410071 | 181929 | 181944 | N/A | N/A | CAGAATTGATAACAGG | 6 | K | 521 |
| 1410120 | 420049 | 420064 | N/A | N/A | ATTTATTTAGGCATCG | 41 | K | 522 |
| 1410213 | 278988 | 279003 | N/A | N/A | CATTATCTATGGCATT | 46 | K | 523 |
| 1410225 | 459483 | 459498 | N/A | N/A | CCAATTAAGTCAATCC | 2 | K | 524 |
| 1410227 | 142889 | 142904 | N/A | N/A | GATATTCCAAAAGTCA | 79 | K | 525 |
| 1410233 | 222039 | 222054 | 1449 | 1464 | AAAGAAGTGTTGTCCA | 4 | K | 526 |
| 1410318 | 194092 | 194107 | N/A | N/A | ACTTATTCATCCTAGC | 75 | K | 527 |
| 1410332 | 437697 | 437712 | N/A | N/A | GAAGTTTTAAGAGTGA | 52 | K | 528 |
| 1410335 | 187717 | 187732 | N/A | N/A | CTATTGAAGGTCTCTG | 74 | K | 529 |
| 1410352 | 155904 | 155919 | N/A | N/A | GAAGTTATTATATGGC | 6 | K | 530 |
| 1410363 | 251925 | 251940 | N/A | N/A | GTTTTAAGTTATCTCA | 5 | K | 531 |
| 1410457 | 491509 | 491524 | N/A | N/A | ATGTAAAGGTGGTTCA | 29 | K | 532 |
| 1410497 | 229865 | 229880 | N/A | N/A | TCAATATTGTGTGTCT | 9 | K | 533 |
| 1410503 | 472182 | 472197 | N/A | N/A | ACCAATTTCAACCTGA | 37 | K | 534 |
| 1410513 | 343144 | 343159 | N/A | N/A | ATTAATTTGTATCCTA | 45 | K | 535 |
| 1410555 | 220850 | 220865 | N/A | N/A | TAAGATGATGCTCCTC | 69 | K | 536 |
| 1411133 | 555893 | 555908 | 4882 | 4897 | ACTTAGACACTACCAT | 32 | K | 537 |
| 1411155 | 559850 | 559865 | 8839 | 8854 | CTCAAACACACTCAGT | 44 | K | 538 |
| 1411161 | 324519 | 324534 | 2242 | 2257 | GAAATCAACACCCTCA | 60 | K | 539 |
| 1411245 | 556453 | 556468 | 5442 | 5457 | TAGCAAGGTACCATTC | 23 | K | 540 |
| 1411249 | 560613 | 560628 | 9602 | 9617 | CTTAAGGTCTTATGTT | 70 | K | 541 |
| 1411281 | 558667 | 558682 | 7656 | 7671 | ATGCAATGGGCCAATT | 54 | K | 542 |
| 1411307 | 285153 | 285168 | 1788 | 1803 | TCCAAAATTTCAGTGC | 12 | K | 543 |
| 1411333 | 557369 | 557384 | 6358 | 6373 | GTTTAATTAGACACTG | 10 | K | 544 |
| 1411372 | 554658 | 554673 | 3647 | 3662 | GCTAGAATTTACTAAA | 72 | K | 545 |
| 1411386 | 222160 | 222175 | 1570 | 1585 | CTCCAAGAACTGACCA | 10 | K | 546 |
| 1411411 | 562030 | 562045 | 11019 | 11034 | GAAAACTTTGAAGGTA | 23 | K | 547 |
| 1411419 | 559427 | 559442 | 8416 | 8431 | ATGGACTAATTACAAC | 42 | K | 548 |
| 1411422 | 559095 | 559110 | 8084 | 8099 | ACAATACCACTATATA | 15 | K | 549 |
| 1173403 | 288679 | 288694 | 2074 | 2089 | TCTATTGGAGAAGTGT | 6 | L | 181 |
| 1408261 | 271181 | 271196 | N/A | N/A | CTTATATTAGTGACAG | 13 | L | 550 |
| 1408290 | 218081 | 218096 | 1047 | 1062 | ATAGGATGCTGGGTCT | 14 | L | 551 |
| 1408328 | 217659 | 217674 | 625 | 640 | TTTACGACTGGCAGTG | 11 | L | 552 |
| 1408344 | 225074 | 225089 | N/A | N/A | TGTATTATTGACCTGG | 7 | L | 553 |
| 1408446 | 222162 | 222177 | 1572 | 1587 | CTCTCCAAGAACTGAC | 13 | L | 554 |
| 1408562 | 288630 | 288645 | 2025 | 2040 | ACAAGAGAGAATGCTT | 30 | L | 555 |
| 1408565 | 290797 | 290812 | N/A | N/A | ATGTAGAGAATGGGAA | 23 | L | 556 |
| 1408588 | 290609 | 290624 | N/A | N/A | AAGCATGAATTCGCTT | 97 | L | 557 |
| 1408596 | 82250 | 82265 | N/A | N/A | ATCAACAGCATAATAA | 90 | L | 558 |
| 1408660 | 235329 | 235344 | N/A | N/A | GAAATGACTGAAATAG | 17 | L | 559 |
| 1408693 | 263190 | 263205 | N/A | N/A | TATTTCTAAAGCCAGA | 35 | L | 560 |
| 1408721 | 263019 | 263034 | N/A | N/A | CTCATACCAAAGTGAT | 81 | L | 561 |
| | 263101 | 263116 | | | | | | |
| 1409091 | 181930 | 181945 | N/A | N/A | GCAGAATTGATAACAG | 8 | L | 562 |
| 1409155 | 259419 | 259434 | N/A | N/A | AGATATCAGGTATCAA | 58 | L | 563 |
| 1409208 | 282805 | 282820 | N/A | N/A | CATTTACAAGTTCCCT | 49 | L | 564 |
| 1409222 | 255724 | 255739 | N/A | N/A | CTTGATTACATGGCAA | 45 | L | 565 |
| 1409234 | 204097 | 204112 | N/A | N/A | CCAGTAAAGATTCTAT | 64 | L | 566 |
| 1409240 | 491544 | 491559 | N/A | N/A | TCATATACAATGACCA | 20 | L | 567 |
| 1409246 | 289540 | 289555 | N/A | N/A | GCAATACTGAAGCTAA | 16 | L | 568 |
| 1409253 | 143745 | 143760 | N/A | N/A | GAAGATTCAAGTCCTA | 62 | L | 569 |
| 1409265 | 180806 | 180821 | N/A | N/A | CCTATTAATTTGCTTG | 49 | L | 570 |
| 1409269 | 190142 | 190157 | N/A | N/A | AATTTATAGACAAGGG | 20 | L | 571 |
| 1409314 | 129330 | 129345 | N/A | N/A | ATAACCAACAGATCCC | 31 | L | 572 |
| 1409384 | 366332 | 366347 | N/A | N/A | AAGAATATGTCAGTGG | 8 | L | 573 |
| 1409417 | 541339 | 541354 | N/A | N/A | GCTCAAATTTGTGTGC | 91 | L | 574 |
| 1409462 | 215895 | 215910 | N/A | N/A | GGAAATACAGTGTACT | 44 | L | 575 |
| 1409502 | 279255 | 279270 | N/A | N/A | GAAGAATCTCAAGGAG | 72 | L | 576 |
| 1409517 | 460169 | 460184 | N/A | N/A | CAAACTATATACTCTA | 65 | L | 577 |
| 1409550 | 158168 | 158183 | N/A | N/A | GCACATTTATAGCATA | 16 | L | 578 |
| 1409552 | 194130 | 194145 | N/A | N/A | TAAATTATACTCACCC | 52 | L | 579 |
| 1409610 | 402245 | 402260 | N/A | N/A | GACTATAAATGGAAGC | 20 | L | 580 |
| 1409625 | 343191 | 343206 | N/A | N/A | GTTTATACTTTCCACT | 13 | L | 581 |
| 1409651 | 267779 | 267794 | N/A | N/A | CAGAAACTTTGGTTGA | 68 | L | 582 |
| 1409656 | 472185 | 472200 | N/A | N/A | GATACCAATTTCAACC | 56 | L | 583 |
| 1409658 | 220871 | 220886 | N/A | N/A | TGGCATAAACTGGACC | 82 | L | 584 |
| 1409709 | 206294 | 206309 | N/A | N/A | GTTCATATCTTTGGAT | 56 | L | 585 |
| 1409715 | 292764 | 292779 | N/A | N/A | AGTATATCGCACACAT | 50 | L | 586 |
| 1409753 | 553745 | 553760 | N/A | N/A | GAATCTAGAACACTCA | 93 | L | 587 |
| 1409763 | 454955 | 454970 | N/A | N/A | AAGTATGGACACATGG | 29 | L | 588 |
| 1409804 | 202309 | 202324 | N/A | N/A | AATATTTCCAACCAGT | 62 | L | 589 |
| 1409818 | 274776 | 274791 | N/A | N/A | GATACAAGAGGCTGAA | 24 | L | 590 |
| 1409944 | 252006 | 252021 | N/A | N/A | ATGATAGAGGACTGTT | 12 | L | 591 |
| 1409953 | 556460 | 556475 | 5449 | 5464 | AATACTGTAGCAAGGT | 11 | L | 592 |
| 1409972 | 96459 | 96474 | N/A | N/A | GCAGATAGTAACCTCT | 47 | L | 593 |
| 1410000 | 509969 | 509984 | N/A | N/A | GTCTATTAATTCATGG | 36 | L | 594 |
| 1410021 | 208850 | 208865 | N/A | N/A | GCAAAGATGCTTTTCC | 80 | L | 595 |
| 1410096 | 438094 | 438109 | N/A | N/A | AAAGTTTTACAGCACA | 19 | L | 596 |
| 1410107 | 309554 | 309569 | N/A | N/A | TACTTAATTCCTGTCA | 62 | L | 597 |
| 1410111 | 300426 | 300441 | N/A | N/A | AGTATAAAGCTATCCT | 23 | L | 598 |
| 1410122 | 62480 | 62495 | N/A | N/A | AATGTATAGAGCTGTG | 107 | L | 599 |
| 1410184 | 187718 | 187733 | N/A | N/A | TCTATTGAAGGTCTCT | 58 | L | 600 |
| 1410236 | 226643 | 226658 | N/A | N/A | CTCTAATTATCCTTTC | 40 | L | 601 |
| 1410254 | 249177 | 249192 | N/A | N/A | CATGATGATAATATTC | 111 | L | 602 |
| 1410282 | 388406 | 388421 | N/A | N/A | ATCATTTAAGTGAAGT | 46 | L | 603 |
| 1410300 | 523006 | 523021 | N/A | N/A | CACTTACTAGTATACA | 51 | L | 604 |
| 1410340 | 233395 | 233410 | N/A | N/A | TCTATACTAAAGACTT | 49 | L | 605 |
| 1410346 | 198427 | 198442 | N/A | N/A | CATGTATGACCTAGAA | 57 | L | 606 |
| 1410373 | 189165 | 189180 | N/A | N/A | ATAATTTACTGGACAG | 20 | L | 607 |
| 1410381 | 13296 | 13311 | N/A | N/A | GTTACTTTAAAGGTCA | 81 | L | 608 |
| 1410391 | 229866 | 229881 | N/A | N/A | CTCAATATTGTGTGTC | 12 | L | 609 |
| 1410402 | 423462 | 423477 | N/A | N/A | AGAACATTAAGTCCAA | 56 | L | 610 |
| 1410501 | 211640 | 211655 | N/A | N/A | CTACATACCAGATCAT | 75 | L | 611 |
| 1410523 | 244767 | 244782 | N/A | N/A | TAGGTAATTTATGAGT | 24 | L | 612 |
| 1410544 | 109485 | 109500 | N/A | N/A | ATCTTTTAATTGGTAC | 32 | L | 613 |
| 1410588 | 240679 | 240694 | N/A | N/A | GAAACTTCGGCTCACT | 14 | L | 614 |
| 1411105 | 324520 | 324535 | 2243 | 2258 | AGAAATCAACACCCTC | 46 | L | 615 |
| 1411157 | 285185 | 285200 | 1820 | 1835 | TACCATTACTGAGATT | 8 | L | 616 |
| 1411192 | 222041 | 222056 | 1451 | 1466 | ATAAAGAAGTGTTGTC | 10 | L | 617 |
| 1411287 | 559154 | 559169 | 8143 | 8158 | AGCATAAAGTCTTATT | 88 | L | 618 |
| 1411354 | 557370 | 557385 | 6359 | 6374 | AGTTTAATTAGACACT | 95 | L | 619 |
| 1411357 | 559928 | 559943 | 8917 | 8932 | ACAATTCAAACTCTCT | 47 | L | 620 |
| 1411359 | 559439 | 559454 | 8428 | 8443 | GCTATATTTTTTATGG | 71 | L | 621 |
| 1411376 | 554661 | 554676 | 3650 | 3665 | CCAGCTAGAATTTACT | 38 | L | 622 |
| 1411400 | 558690 | 558705 | 7679 | 7694 | CTCTATGAAGACATTC | 37 | L | 623 |
| 1411441 | 560614 | 560629 | 9603 | 9618 | TCTTAAGGTCTTATGT | 44 | L | 624 |
| 1411448 | 555896 | 555911 | 4885 | 4900 | ACCACTTAGACACTAC | 16 | L | 625 |
| 1411450 | 562035 | 562050 | 11024 | 11039 | GTGGAGAAAACTTTGA | 23 | L | 626 |
| 1173403 | 288679 | 288694 | 2074 | 2089 | TCTATTGGAGAAGTGT | 5 | M | 181 |
| 1408260 | 271182 | 271197 | N/A | N/A | TCTTATATTAGTGACA | 35 | M | 627 |
| 1408286 | 218083 | 218098 | 1049 | 1064 | CTATAGGATGCTGGGT | 9 | M | 628 |
| 1408319 | 217660 | 217675 | 626 | 641 | TTTTACGACTGGCAGT | 11 | M | 629 |
| 1408343 | 225075 | 225090 | N/A | N/A | GTGTATTATTGACCTG | 6 | M | 630 |
| 1408415 | 222232 | 222247 | 1642 | 1657 | AGAATAGCCCATCACG | 9 | M | 631 |
| 1408501 | 222042 | 222057 | 1452 | 1467 | TATAAAGAAGTGTTGT | 43 | M | 632 |
| 1408547 | 288669 | 288684 | 2064 | 2079 | AAGTGTATTAAAACTC | 82 | M | 633 |
| 1408583 | 290799 | 290814 | N/A | N/A | CCATGTAGAGAATGGG | 89 | M | 634 |
| 1408595 | 82260 | 82275 | N/A | N/A | GAATGCTTAAATCAAC | 87 | M | 635 |
| 1408654 | 235372 | 235387 | N/A | N/A | TATAGACTGCAATTTC | 24 | M | 636 |
| 1408691 | 249264 | 249279 | N/A | N/A | CTACAGCTTATCCTGC | 55 | M | 637 |
| 1408692 | 263200 | 263215 | N/A | N/A | CTGAGATGAATATTTC | 46 | M | 638 |
| 1408720 | 263029 | 263044 | N/A | N/A | ATAGTATCAGCTCATA | 50 | M | 639 |
| 1409136 | 198457 | 198472 | N/A | N/A | CACTAGCAGTGATCTG | 69 | M | 640 |
| 1409167 | 220975 | 220990 | N/A | N/A | ATTACTGGAATCCACA | 57 | M | 641 |
| 1409182 | 541498 | 541513 | N/A | N/A | GATTTTGAGGCTCTCT | 50 | M | 642 |
| 1409184 | 267814 | 267829 | N/A | N/A | GCTATTAGATTTACAC | 40 | M | 643 |
| 1409194 | 97097 | 97112 | N/A | N/A | TTAATCACAATCTCCA | 7 | M | 644 |
| 1409219 | 204158 | 204173 | N/A | N/A | ACTTTTAACAAACAGG | 45 | M | 645 |
| 1409279 | 366439 | 366454 | N/A | N/A | ACATATGACAGAGTTC | 16 | M | 646 |
| 1409330 | 274779 | 274794 | N/A | N/A | TGGGATACAAGAGGCT | 32 | M | 647 |
| 1409393 | 344743 | 344758 | N/A | N/A | AATTTAGTATCCTTCA | 4 | M | 648 |
| 1409420 | 391181 | 391196 | N/A | N/A | TAGGATTAAGGAGTTC | 6 | M | 649 |
| 1409441 | 16857 | 16872 | N/A | N/A | ACAGAATGATAACCCA | 108 | M | 650 |
| 1409459 | 259452 | 259467 | N/A | N/A | GAAATTATCTTCTGTC | 90 | M | 651 |
| 1409470 | 310545 | 310560 | N/A | N/A | TCTAATTTAGTTCTGC | 24 | M | 652 |
| 1409525 | 244769 | 244784 | N/A | N/A | TATAGGTAATTTATGA | 95 | M | 653 |
| 1409527 | 143950 | 143965 | N/A | N/A | AAGTACAAATGAGTCA | 25 | M | 654 |
| 1409541 | 209074 | 209089 | N/A | N/A | GTTCATACTTTACTGC | 44 | M | 655 |
| 1409560 | 187719 | 187734 | N/A | N/A | TTCTATTGAAGGTCTC | 60 | M | 656 |
| 1409598 | 189503 | 189518 | N/A | N/A | AAGCAATTCACCCTTC | 73 | M | 657 |
| 1409612 | 109872 | 109887 | N/A | N/A | CATGATAAATGCTACT | 64 | M | 658 |
| 1409620 | 438335 | 438350 | N/A | N/A | GTGTAGAAACTGCTGG | 27 | M | 659 |
| 1409634 | 181089 | 181104 | N/A | N/A | ACAAATCTCAGTTCCC | 19 | M | 660 |
| 1409641 | 190235 | 190250 | N/A | N/A | GCAGAAGAGTTCTTGT | 65 | M | 661 |
| 1409643 | 558703 | 558718 | 7692 | 7707 | TTAATGACATTCTCTC | 19 | M | 662 |
| 1409652 | 233418 | 233433 | N/A | N/A | ACTATTCAATACATCT | 10 | M | 663 |
| 1409681 | 256327 | 256342 | N/A | N/A | GCATTTAGTTATCTAG | 46 | M | 664 |
| 1409706 | 211659 | 211674 | N/A | N/A | TTGTAGATTCCTCAGG | 64 | M | 665 |
| 1409749 | 510574 | 510589 | N/A | N/A | ATCTAATTACTATCCA | 43 | M | 666 |
| 1409760 | 181961 | 181976 | N/A | N/A | TATATTGATGGATGTA | 13 | M | 667 |
| 1409841 | 426279 | 426294 | N/A | N/A | ACATTAAGATTGCTGC | 22 | M | 668 |
| 1409848 | 553761 | 553776 | N/A | N/A | CCAGATGGAACACCAT | 40 | M | 669 |
| 1409870 | 158523 | 158538 | N/A | N/A | GAAAATTTGCTTAGAC | 10 | M | 670 |
| 1409927 | 460170 | 460185 | N/A | N/A | TCAAACTATATACTCT | 55 | M | 671 |
| 1409928 | 252076 | 252091 | N/A | N/A | GATCTTGAAGATGCCA | 40 | M | 672 |
| 1409963 | 279470 | 279485 | N/A | N/A | GCAATAGTATACTTTG | 98 | M | 673 |
| 1409974 | 206447 | 206462 | N/A | N/A | GCAAATGTAAACTTGA | 71 | M | 674 |
| 1409979 | 456755 | 456770 | N/A | N/A | GCATAGAACTAGGTGT | 73 | M | 675 |
| 1410006 | 129362 | 129377 | N/A | N/A | GAAGTAGTAAGTCATT | 42 | M | 676 |
| 1410018 | 292765 | 292780 | N/A | N/A | AAGTATATCGCACACA | 10 | M | 677 |
| 1410043 | 62815 | 62830 | N/A | N/A | CCTATTAAAGACTCTC | 90 | M | 678 |
| 1410056 | 242135 | 242150 | N/A | N/A | ACAACTTAAAGTCCTC | 12 | M | 679 |
| 1410129 | 478979 | 478994 | N/A | N/A | AGATTATTAGGACACA | 5 | M | 680 |
| 1410199 | 404955 | 404970 | N/A | N/A | CAGATAAAGGAGGCTT | 51 | M | 681 |
| 1410337 | 194131 | 194146 | N/A | N/A | GTAAATTATACTCACC | 64 | M | 682 |
| 1410338 | 525748 | 525763 | N/A | N/A | AATATTTAGTATTGGG | 25 | M | 683 |
| 1410353 | 202311 | 202326 | N/A | N/A | CTAATATTTCCAACCA | 42 | M | 684 |
| 1410418 | 289709 | 289724 | N/A | N/A | GGCTAATGGTGACAGA | 58 | M | 685 |
| 1410423 | 285254 | 285269 | 1889 | 1904 | ATCTTTTGAATCTGTC | 4 | M | 686 |
| 1410445 | 215920 | 215935 | N/A | N/A | TATCATGAAAACCCTC | 101 | M | 687 |
| 1410489 | 226682 | 226697 | N/A | N/A | GACACAAAGGAACCCA | 12 | M | 688 |
| 1410553 | 491546 | 491561 | N/A | N/A | GATCATATACAATGAC | 64 | M | 689 |
| 1410554 | 282990 | 283005 | N/A | N/A | CCGGATTTTATACTTT | 84 | M | 690 |
| 1410571 | 229867 | 229882 | N/A | N/A | TCTCAATATTGTGTGT | 19 | M | 691 |
| 1410580 | 300427 | 300442 | N/A | N/A | GAGTATAAAGCTATCC | 34 | M | 692 |
| 1411099 | 559470 | 559485 | 8459 | 8474 | ATGATATGGTGGGTAC | 28 | M | 693 |
| 1411115 | 559158 | 559173 | 8147 | 8162 | TTCTAGCATAAAGTCT | 49 | M | 694 |
| 1411158 | 555899 | 555914 | 4888 | 4903 | CATACCACTTAGACAC | 21 | M | 695 |
| 1411164 | 324521 | 324536 | 2244 | 2259 | GAGAAATCAACACCCT | 31 | M | 696 |
| 1411180 | 554670 | 554685 | 3659 | 3674 | ATATTAACTCCAGCTA | 50 | M | 697 |
| 1411208 | 557383 | 557398 | 6372 | 6387 | AAAAGTATTGCTCAGT | 12 | M | 698 |
| 1411209 | 556462 | 556477 | 5451 | 5466 | GAAATACTGTAGCAAG | 11 | M | 699 |
| 1411237 | 559929 | 559944 | 8918 | 8933 | CACAATTCAAACTCTC | 30 | M | 700 |
| 1411272 | 562045 | 562060 | 11034 | 11049 | GAAATGATTGGTGGAG | 15 | M | 701 |
| 1411298 | 290648 | 290663 | 2127 | 2142 | AGGCAATGGACTCCAT | 54 | M | 702 |
| 1411319 | 560615 | 560630 | 9604 | 9619 | ATCTTAAGGTCTTATG | 18 | M | 703 |
| 1173403 | 288679 | 288694 | 2074 | 2089 | TCTATTGGAGAAGTGT | 4 | N | 181 |
| 1408283 | 218084 | 218099 | 1050 | 1065 | TCTATAGGATGCTGGG | 16 | N | 704 |
| 1408304 | 217662 | 217677 | 628 | 643 | TGTTTTACGACTGGCA | 4 | N | 705 |
| 1408342 | 225076 | 225091 | N/A | N/A | TGTGTATTATTGACCT | 5 | N | 706 |
| 1408561 | 288670 | 288685 | 2065 | 2080 | GAAGTGTATTAAAACT | 19 | N | 707 |
| 1408594 | 82280 | 82295 | N/A | N/A | GTAAGCACTTAATATT | 20 | N | 708 |
| 1408653 | 235382 | 235397 | N/A | N/A | ACAACTATTTTATAGA | 77 | N | 709 |
| 1408690 | 249274 | 249289 | N/A | N/A | ACACCCTGAACTACAG | 48 | N | 710 |
| 1408703 | 263030 | 263045 | N/A | N/A | AATAGTATCAGCTCAT | 16 | N | 711 |
| 1408733 | 271259 | 271274 | N/A | N/A | GTCTTTAAAATCAGTT | 46 | N | 712 |
| 1409093 | 480013 | 480028 | N/A | N/A | AGTATTAATTATCCCT | 18 | N | 713 |
| 1409142 | 23017 | 23032 | N/A | N/A | GATTATAAACACCTCA | 85 | N | 714 |
| 1409148 | 293013 | 293028 | N/A | N/A | GTCAAACAGACACTAA | 56 | N | 715 |
| 1409181 | 182206 | 182221 | N/A | N/A | CGTGAATACAACAACA | 76 | N | 716 |
| 1409255 | 259517 | 259532 | N/A | N/A | CTTTTAGTCATTTCCC | 7 | N | 717 |
| 1409344 | 460171 | 460186 | N/A | N/A | CTCAAACTATATACTC | 36 | N | 718 |
| 1409365 | 189591 | 189606 | N/A | N/A | CTTACAACGGTACTTA | 36 | N | 719 |
| 1409386 | 233421 | 233436 | N/A | N/A | GTAACTATTCAATACA | 84 | N | 720 |
| 1409396 | 161477 | 161492 | N/A | N/A | GACTATTATTCCACAC | 7 | N | 721 |
| 1409418 | 301012 | 301027 | N/A | N/A | GATATTCAATGTGCTC | 5 | N | 722 |
| 1409419 | 347109 | 347124 | N/A | N/A | AATTAGTTAATCTTCC | 9 | N | 723 |
| 1409457 | 252132 | 252147 | N/A | N/A | TGAATTAAGAACAAGG | 5 | N | 724 |
| 1409466 | 291133 | 291148 | N/A | N/A | ACTAGTAAAAGACTAG | 89 | N | 725 |
| 1409497 | 541574 | 541589 | N/A | N/A | GCATTAGAAGAAGCAG | 59 | N | 726 |
| 1409504 | 279471 | 279486 | N/A | N/A | GGCAATAGTATACTTT | 95 | N | 727 |
| 1409515 | 310547 | 310562 | N/A | N/A | CCTCTAATTTAGTTCT | 21 | N | 728 |
| 1409545 | 256329 | 256344 | N/A | N/A | CAGCATTTAGTTATCT | 17 | N | 729 |
| 1409576 | 209102 | 209117 | N/A | N/A | ACACTAGTAGAATGTG | 96 | N | 730 |
| 1409592 | 426280 | 426295 | N/A | N/A | AACATTAAGATTGCTG | 20 | N | 731 |
| 1409597 | 560636 | 560651 | 9625 | 9640 | TAGAATATTCTGGCTC | 17 | N | 732 |
| 1409628 | 202312 | 202327 | N/A | N/A | CCTAATATTTCCAACC | 66 | N | 733 |
| 1409637 | 217188 | 217203 | N/A | N/A | GCATATTCACACAGAT | 32 | N | 734 |
| 1409674 | 283006 | 283021 | N/A | N/A | GAATATGCCCAAACCA | 46 | N | 735 |
| 1409758 | 112127 | 112142 | N/A | N/A | AAGATTTTAACTGTCG | 55 | N | 736 |
| 1409827 | 229903 | 229918 | N/A | N/A | CATTTAGAGGCATTGC | 6 | N | 737 |
| 1409845 | 63020 | 63035 | N/A | N/A | GCAAGAATAGTATGTT | 106 | N | 738 |
| 1409865 | 181090 | 181105 | N/A | N/A | TACAAATCTCAGTTCC | 37 | N | 739 |
| 1409884 | 456917 | 456932 | N/A | N/A | ACAGATTTAGTGATGA | 34 | N | 740 |
| 1409894 | 391217 | 391232 | N/A | N/A | AAGTAGGTGTATTGAT | 92 | N | 741 |
| 1409903 | 198471 | 198486 | N/A | N/A | CTACAGTATCCATTCA | 37 | N | 742 |
| 1409907 | 190336 | 190351 | N/A | N/A | GCTAAGGGTATTGTCC | 29 | N | 743 |
| 1409937 | 129434 | 129449 | N/A | N/A | ACAATAGATCACCAGC | 79 | N | 744 |
| 1409943 | 206501 | 206516 | N/A | N/A | TCACAATGAATGGCCA | 74 | N | 745 |
| 1409961 | 511378 | 511393 | N/A | N/A | ACTATTGAATGACTTA | 26 | N | 746 |
| 1409970 | 97752 | 97767 | N/A | N/A | CTCATTAAATCAAGGC | 7 | N | 747 |
| 1409996 | 438442 | 438457 | N/A | N/A | ACACTATGATCAGCAA | 29 | N | 748 |
| 1410015 | 526683 | 526698 | N/A | N/A | GCTATACAGGATCTTC | 24 | N | 749 |
| 1410063 | 290654 | 290669 | 2133 | 2148 | CAGGTAAGGCAATGGA | 3 | N | 750 |
| 1410073 | 289911 | 289926 | N/A | N/A | TCACAAGTTCTACATA | 34 | N | 751 |
| 1410140 | 194646 | 194661 | N/A | N/A | CATCATTAACATCTCC | 26 | N | 752 |
| 1410153 | 244778 | 244793 | N/A | N/A | AGCATAAATTATAGGT | 20 | N | 753 |
| 1410179 | 227001 | 227016 | N/A | N/A | GATGTAATTCACCTGT | 33 | N | 754 |
| 1410262 | 263253 | 263268 | N/A | N/A | AATCTAATTATGGCTA | 35 | N | 755 |
| 1410279 | 187927 | 187942 | N/A | N/A | ACTTTTGAGATTCCTG | 14 | N | 756 |
| 1410310 | 274873 | 274888 | N/A | N/A | GGTAATAAATGCTACA | 70 | N | 757 |
| 1410348 | 242389 | 242404 | N/A | N/A | GTCAAGTAATGAGTTT | 4 | N | 758 |
| 1410354 | 558717 | 558732 | 7706 | 7721 | GCAGATTCAAGTATTT | 21 | N | 759 |
| 1410377 | 211664 | 211679 | N/A | N/A | CATATTTGTAGATTCC | 40 | N | 760 |
| 1410382 | 220979 | 220994 | N/A | N/A | AGGTATTACTGGAATC | 43 | N | 761 |
| 1410449 | 366440 | 366455 | N/A | N/A | GACATATGACAGAGTT | 27 | N | 762 |
| 1410459 | 204252 | 204267 | N/A | N/A | CCCAAGTATATCTAGA | 49 | N | 763 |
| 1410466 | 144612 | 144627 | N/A | N/A | GATACTACAACACTGG | 88 | N | 764 |
| 1410494 | 493729 | 493744 | N/A | N/A | ACCAATAGGCAAGTTT | 48 | N | 765 |
| 1410496 | 267815 | 267830 | N/A | N/A | AGCTATTAGATTTACA | 79 | N | 766 |
| 1410520 | 406822 | 406837 | N/A | N/A | GCAAAAACACGAGTGG | 75 | N | 767 |
| 1411083 | 556465 | 556480 | 5454 | 5469 | TCAGAAATACTGTAGC | 11 | N | 768 |
| 1411087 | 554043 | 554058 | 3032 | 3047 | TTTCATAGCGGGTTTT | 24 | N | 769 |
| 1411094 | 555901 | 555916 | 4890 | 4905 | AACATACCACTTAGAC | 27 | N | 770 |
| 1411102 | 557384 | 557399 | 6373 | 6388 | CAAAAGTATTGCTCAG | 14 | N | 771 |
| 1411116 | 562047 | 562062 | 11036 | 11051 | CTGAAATGATTGGTGG | 12 | N | 772 |
| 1411134 | 554885 | 554900 | 3874 | 3889 | AGCTAATGTGCTTCCC | 57 | N | 773 |
| 1411169 | 559472 | 559487 | 8461 | 8476 | AAATGATATGGTGGGT | 19 | N | 774 |
| 1411210 | 559980 | 559995 | 8969 | 8984 | GTAACTACCAACACAT | 55 | N | 775 |
| 1411246 | 285263 | 285278 | 1898 | 1913 | CAACATCTGATCTTTT | 60 | N | 776 |
| 1411321 | 222043 | 222058 | 1453 | 1468 | GTATAAAGAAGTGTTG | 11 | N | 777 |
| 1411370 | 559163 | 559178 | 8152 | 8167 | GAATTTTCTAGCATAA | 47 | N | 778 |
| 1411403 | 222233 | 222248 | 1643 | 1658 | TAGAATAGCCCATCAC | 8 | N | 779 |
| 1411408 | 324522 | 324537 | 2245 | 2260 | GGAGAAATCAACACCC | 90 | N | 780 |
| 1173403 | 288679 | 288694 | 2074 | 2089 | TCTATTGGAGAAGTGT | 5 | O | 181 |
| 1408282 | 218085 | 218100 | 1051 | 1066 | ATCTATAGGATGCTGG | 7 | O | 781 |
| 1408292 | 217663 | 217678 | 629 | 644 | GTGTTTTACGACTGGC | 5 | O | 782 |
| 1408308 | 288676 | 288691 | 2071 | 2086 | ATTGGAGAAGTGTATT | 9 | O | 783 |
| 1408575 | 290657 | 290672 | 2136 | 2151 | GCACAGGTAAGGCAAT | 25 | O | 784 |
| 1408593 | 82320 | 82335 | N/A | N/A | GGACAAGGTTTTTTGG | 21 | O | 785 |
| 1408634 | 225093 | 225108 | N/A | N/A | AAAAATGTGTGGAAAC | 60 | O | 786 |
| 1408652 | 235392 | 235407 | N/A | N/A | AGTTTTTTGAACAACT | 87 | O | 787 |
| 1408689 | 249284 | 249299 | N/A | N/A | TTTAGAGACCACACCC | 44 | O | 788 |
| 1408719 | 263039 | 263054 | N/A | N/A | TGGTATGATAATAGTA | 20 | O | 789 |
| 1408732 | 271269 | 271284 | N/A | N/A | AGAATGAAGAGTCTTT | 76 | O | 790 |
| 1409172 | 190337 | 190352 | N/A | N/A | GGCTAAGGGTATTGTC | 70 | O | 791 |
| 1409191 | 279497 | 279512 | N/A | N/A | CAGTATACTATTGCCC | 106 | O | 792 |
| 1409272 | 189649 | 189664 | N/A | N/A | GTTCAAGGTTTTGTGC | 42 | O | 793 |
| 1409290 | 256433 | 256448 | N/A | N/A | CAAGACAAGCCAGTGG | 46 | O | 794 |
| 1409309 | 194725 | 194740 | N/A | N/A | ACACATTTAACATGTC | 68 | O | 795 |
| 1409343 | 283198 | 283213 | N/A | N/A | AACCATTTACTGTCTA | 24 | O | 796 |
| 1409349 | 511747 | 511762 | N/A | N/A | GAAACTAAAAAGTCCC | 81 | O | 797 |
| 1409357 | 252381 | 252396 | N/A | N/A | GATGATAAATGTAGAT | 34 | O | 798 |
| 1409363 | 211762 | 211777 | N/A | N/A | TTCTTTAGATCATTCA | 33 | O | 799 |
| 1409387 | 480203 | 480218 | N/A | N/A | TGTATATTAACCTCTA | 49 | O | 800 |
| 1409422 | 291143 | 291158 | N/A | N/A | TATTATTTCAACTAGT | 83 | O | 801 |
| 1409469 | 229905 | 229920 | N/A | N/A | AACATTTAGAGGCATT | 5 | O | 802 |
| 1409496 | 541658 | 541673 | N/A | N/A | TGAAATTGGTTACTAG | 35 | O | 803 |
| 1409507 | 198475 | 198490 | N/A | N/A | TAACCTACAGTATCCA | 51 | O | 804 |
| 1409522 | 285360 | 285375 | N/A | N/A | GGTTATTGAAAGGTAA | 72 | O | 805 |
| 1409556 | 202315 | 202330 | N/A | N/A | AACCCTAATATTTCCA | 42 | O | 806 |
| 1409578 | 493799 | 493814 | N/A | N/A | GACAATAATTTGAGAC | 89 | O | 807 |
| 1409613 | 181094 | 181109 | N/A | N/A | ACTATACAAATCTCAG | 30 | O | 808 |
| 1409616 | 206512 | 206527 | N/A | N/A | GTAAATTTCTCTCACA | 89 | O | 809 |
| 1409636 | 366671 | 366686 | N/A | N/A | TAGGAATGAGCTGTCA | 4 | O | 810 |
| 1409702 | 310815 | 310830 | N/A | N/A | CCAAATATTGGTAGTT | 62 | O | 811 |
| 1409744 | 526767 | 526782 | N/A | N/A | AATACCTTAAGCTCTC | 73 | O | 812 |
| 1409788 | 27335 | 27350 | N/A | N/A | CATACTAATATGCTTT | 87 | O | 813 |
| 1409826 | 324765 | 324780 | N/A | N/A | AATTTACTTACCTCAG | 47 | O | 814 |
| 1409887 | 204884 | 204899 | N/A | N/A | TGTCATAACTTCTGGT | 33 | O | 815 |
| 1409917 | 244779 | 244794 | N/A | N/A | CAGCATAAATTATAGG | 17 | O | 816 |
| 1409919 | 129631 | 129646 | N/A | N/A | TAGAATACAAGACACA | 68 | O | 817 |
| 1409929 | 227004 | 227019 | N/A | N/A | GCAGATGTAATTCACC | 15 | O | 818 |
| 1409945 | 112378 | 112393 | N/A | N/A | CTGATATGAGAGATGT | 9 | O | 819 |
| 1409947 | 217219 | 217234 | N/A | N/A | TGTAGAAAGACAGGGC | 83 | O | 820 |
| 1409956 | 242425 | 242440 | N/A | N/A | TAATCTAAGGAGCCAG | 11 | O | 821 |
| 1409967 | 220999 | 221014 | N/A | N/A | CATAAGTCATCCACAT | 80 | O | 822 |
| 1409969 | 98076 | 98091 | N/A | N/A | AATCATTCAACCCTCA | 40 | O | 823 |
| 1410070 | 407487 | 407502 | N/A | N/A | CACATTAAAGGACTTT | 16 | O | 824 |
| 1410077 | 65031 | 65046 | N/A | N/A | AGTAAATTATCAATCC | 105 | O | 825 |
| 1410083 | 164331 | 164346 | N/A | N/A | GTTTATTCAAGGACTA | 17 | O | 826 |
| 1410099 | 426309 | 426324 | N/A | N/A | ATGAATAACACTATTC | 99 | O | 827 |
| 1410104 | 260250 | 260265 | N/A | N/A | TCTAATAGGGCACTTC | 22 | O | 828 |
| 1410113 | 182221 | 182236 | N/A | N/A | ACAGAGTAACAACCCC | 10 | O | 829 |
| 1410131 | 233648 | 233663 | N/A | N/A | CTCATTAAGTTCTTCA | 4 | O | 830 |
| 1410146 | 209207 | 209222 | N/A | N/A | CTGAATTAGTCCTACC | 90 | O | 831 |
| 1410176 | 222044 | 222059 | 1454 | 1469 | AGTATAAAGAAGTGTT | 6 | O | 832 |
| 1410217 | 268234 | 268249 | N/A | N/A | TAAACTTCTATACCCA | 22 | O | 833 |
| 1410219 | 438491 | 438506 | N/A | N/A | CCATTAACATCCTTTC | 36 | O | 834 |
| 1410269 | 188085 | 188100 | N/A | N/A | TCTAATGGAGAGTCCC | 68 | O | 835 |
| 1410299 | 391218 | 391233 | N/A | N/A | GAAGTAGGTGTATTGA | 68 | O | 836 |
| 1410307 | 456979 | 456994 | N/A | N/A | GATATTAATATCCTCT | 71 | O | 837 |
| 1410361 | 348229 | 348244 | N/A | N/A | ACAATATGGGCTTCAA | 21 | O | 838 |
| 1410450 | 263254 | 263269 | N/A | N/A | AAATCTAATTATGGCT | 76 | O | 839 |
| 1410454 | 145780 | 145795 | N/A | N/A | CCAATTACAGATCACA | 44 | O | 840 |
| 1410470 | 293045 | 293060 | N/A | N/A | ATGATTCGATTTCATA | 87 | O | 841 |
| 1410491 | 289917 | 289932 | N/A | N/A | TTATTATCACAAGTTC | 29 | O | 842 |
| 1410492 | 460809 | 460824 | N/A | N/A | AGGAATATAACCAGGG | 12 | O | 843 |
| 1410507 | 301111 | 301126 | N/A | N/A | GATTATGTCATGCTGC | 14 | O | 844 |
| 1410522 | 274909 | 274924 | N/A | N/A | AATTTAGTTTGATCAA | 91 | O | 845 |
| 1411077 | 555909 | 555924 | 4898 | 4913 | ATCATAATAACATACC | 17 | O | 846 |
| 1411190 | 557460 | 557475 | 6449 | 6464 | ACACATAATCCAGGGA | 15 | O | 847 |
| 1411216 | 222234 | 222249 | 1644 | 1659 | CTAGAATAGCCCATCA | 16 | O | 848 |
| 1411290 | 559473 | 559488 | 8462 | 8477 | TAAATGATATGGTGGG | 18 | O | 849 |
| 1411324 | 556549 | 556564 | 5538 | 5553 | GAGTTAATATTAGTGA | 19 | O | 850 |
| 1411363 | 554909 | 554924 | 3898 | 3913 | GAAATGGAATCAGCAC | 74 | O | 851 |
| 1411364 | 558728 | 558743 | 7717 | 7732 | CAAACTGTCATGCAGA | 37 | O | 852 |
| 1411383 | 554048 | 554063 | 3037 | 3052 | ATACATTTCATAGCGG | 23 | O | 853 |
| 1411385 | 562048 | 562063 | 11037 | 11052 | ACTGAAATGATTGGTG | 67 | O | 854 |
| 1411407 | 560637 | 560652 | 9626 | 9641 | TTAGAATATTCTGGCT | 25 | O | 855 |
| 1411420 | 560032 | 560047 | 9021 | 9036 | AATAGTTTGAGACTAT | 88 | O | 856 |
| 1411446 | 559219 | 559234 | 8208 | 8223 | AAAGATTCACAAGGTT | 13 | O | 857 |
| 1173403 | 288679 | 288694 | 2074 | 2089 | TCTATTGGAGAAGTGT | 5 | p | 181 |
| 1408242 | 217664 | 217679 | 630 | 645 | TGTGTTTTACGACTGG | 6 | p | 858 |
| 1408307 | 288677 | 288692 | 2072 | 2087 | TATTGGAGAAGTGTAT | 15 | P | 859 |
| 1408609 | 181162 | 181177 | N/A | N/A | AGAAATTAGTTAAACG | 86 | P | 860 |
| 1408629 | 189678 | 189693 | N/A | N/A | CATAACAGCTACATTT | 82 | P | 861 |
| 1408633 | 225133 | 225148 | N/A | N/A | CGCAGATGAAATTTTA | 6 | P | 862 |
| 1408651 | 235432 | 235447 | N/A | N/A | ACAAAGTAACTTTGCC | 16 | P | 863 |
| 1408688 | 249334 | 249349 | N/A | N/A | AACACGGCAGGCCAGT | 34 | P | 864 |
| 1408702 | 263040 | 263055 | N/A | N/A | ATGGTATGATAATAGT | 14 | P | 865 |
| 1408731 | 271289 | 271304 | N/A | N/A | CCAGCAAAAAAAGGAA | 91 | P | 866 |
| 1408821 | 218092 | 218107 | 1058 | 1073 | TCTCAAAATCTATAGG | 24 | P | 867 |
| 1409097 | 367746 | 367761 | N/A | N/A | GTCTTAAGAGATTCCC | 7 | P | 868 |
| 1409104 | 263255 | 263270 | N/A | N/A | AAAATCTAATTATGGC | 101 | P | 869 |
| 1409112 | 233649 | 233664 | N/A | N/A | GCTCATTAAGTTCTTC | 11 | P | 870 |
| 1409159 | 494220 | 494235 | N/A | N/A | AGTAAACATTGACAGG | 11 | P | 871 |
| 1409176 | 460810 | 460825 | N/A | N/A | AAGGAATATAACCAGG | 12 | P | 872 |
| 1409273 | 165660 | 165675 | N/A | N/A | GTCTAACACATACTTG | 19 | P | 873 |
| 1409281 | 528193 | 528208 | N/A | N/A | GAAGACAGTATTGCTT | 59 | P | 874 |
| 1409302 | 348316 | 348331 | N/A | N/A | GCTAAGATTATCCGTC | 8 | P | 875 |
| 1409304 | 202574 | 202589 | N/A | N/A | CCAGTAACATCCATTT | 27 | P | 876 |
| 1409551 | 274910 | 274925 | N/A | N/A | GAATTTAGTTTGATCA | 52 | P | 877 |
| 1409574 | 439154 | 439169 | N/A | N/A | GAAACATTCAGACTCA | 72 | P | 878 |
| 1409586 | 293104 | 293119 | N/A | N/A | GCATTAAGGAGAAGGT | 18 | P | 879 |
| 1409594 | 190413 | 190428 | N/A | N/A | TGAATTAGAGATACTG | 46 | P | 880 |
| 1409608 | 145781 | 145796 | N/A | N/A | TCCAATTACAGATCAC | 36 | P | 881 |
| 1409653 | 68194 | 68209 | N/A | N/A | TTAAACTATGCAGTCC | 100 | P | 882 |
| 1409672 | 29562 | 29577 | N/A | N/A | ACATATTAATGTCTCA | 79 | P | 883 |
| 1409810 | 194966 | 194981 | N/A | N/A | ACATTATCTCAGAAGG | 26 | P | 884 |
| 1409833 | 301257 | 301272 | N/A | N/A | CCCATATGACAATTCC | 5 | P | 885 |
| 1409892 | 209497 | 209512 | N/A | N/A | AATAGTACAGGTGAGA | 83 | P | 886 |
| 1409895 | 98134 | 98149 | N/A | N/A | GAATATTTACAATGCG | 18 | P | 887 |
| 1409921 | 407648 | 407663 | N/A | N/A | GCCAATTTTATAGCCA | 26 | P | 888 |
| 1409922 | 511991 | 512006 | N/A | N/A | TAGGTATAGAACTGGA | 8 | P | 889 |
| 1409940 | 227249 | 227264 | N/A | N/A | TCAAATCGCACTTCAA | 10 | P | 890 |
| 1409985 | 198476 | 198491 | N/A | N/A | CTAACCTACAGTATCC | 66 | P | 891 |
| 1410012 | 289935 | 289950 | N/A | N/A | ATTTATTCTAGTACCA | 13 | P | 892 |
| 1410034 | 268373 | 268388 | N/A | N/A | GCTAATTCAAACACTG | 38 | P | 893 |
| 1410105 | 188189 | 188204 | N/A | N/A | GCATAGTATTCCTGGC | 43 | P | 894 |
| 1410110 | 541767 | 541782 | N/A | N/A | GAATCAATGAACTCTT | 37 | P | 895 |
| 1410123 | 182392 | 182407 | N/A | N/A | AGGATTAGAGCCTAGG | 35 | P | 896 |
| 1410125 | 204973 | 204988 | N/A | N/A | GAATTTGAGCTCATCT | 73 | P | 897 |
| 1410142 | 82463 | 82478 | N/A | N/A | AACAATGCTGATTCAG | 4 | P | 898 |
| 1410181 | 252445 | 252460 | N/A | N/A | GGATTAAGTGGAGGTT | 9 | P | 899 |
| 1410196 | 211921 | 211936 | N/A | N/A | GTATTACTATTACATC | 85 | P | 900 |
| 1410211 | 290664 | 290679 | 2143 | 2158 | CATTATTGCACAGGTA | 7 | P | 901 |
| 1410235 | 426497 | 426512 | N/A | N/A | CTAACATAATACTTCA | 55 | P | 902 |
| 1410270 | 285371 | 285386 | N/A | N/A | AGAATAGACTTGGTTA | 92 | P | 903 |
| 1410273 | 279834 | 279849 | N/A | N/A | CCAAATTCTGTGAACT | 27 | P | 904 |
| 1410285 | 260440 | 260455 | N/A | N/A | CCACTAAATTTTTCCC | 41 | P | 905 |
| 1410294 | 242427 | 242442 | N/A | N/A | ACTAATCTAAGGAGCC | 12 | P | 906 |
| 1410328 | 221001 | 221016 | N/A | N/A | CTCATAAGTCATCCAC | 45 | P | 907 |
| 1410341 | 244877 | 244892 | N/A | N/A | AATATGGTATCTTGTC | 6 | P | 908 |
| 1410351 | 391265 | 391280 | N/A | N/A | CATACAAGTAACATCC | 10 | P | 909 |
| 1410370 | 112417 | 112432 | N/A | N/A | GATAGAGAGATTTGTC | 14 | P | 910 |
| 1410379 | 256980 | 256995 | N/A | N/A | GAGGTTATAATTGAGC | 10 | P | 911 |
| 1410404 | 480317 | 480332 | N/A | N/A | GAAGATACAACTCACG | 23 | P | 912 |
| 1410409 | 310816 | 310831 | N/A | N/A | GCCAAATATTGGTAGT | 94 | P | 913 |
| 1410479 | 129805 | 129820 | N/A | N/A | ATCATTTAGATGCATG | 84 | P | 914 |
| 1410506 | 229906 | 229921 | N/A | N/A | GAACATTTAGAGGCAT | 4 | P | 915 |
| 1410512 | 324766 | 324781 | N/A | N/A | AAATTTACTTACCTCA | 56 | P | 916 |
| 1410521 | 291177 | 291192 | N/A | N/A | TTAAGTAGATGATGAG | 7 | P | 917 |
| 1410559 | 206514 | 206529 | N/A | N/A | TAGTAAATTTCTCTCA | 72 | P | 918 |
| 1410589 | 283200 | 283215 | N/A | N/A | ATAACCATTTACTGTC | 38 | P | 919 |
| 1411076 | 457264 | 457279 | 2389 | 2404 | AATACGACTGATGGTC | 11 | P | 920 |
| 1411106 | 560037 | 560052 | 9026 | 9041 | GCAAAAATAGTTTGAG | 17 | P | 921 |
| 1411118 | 222235 | 222250 | 1645 | 1660 | ACTAGAATAGCCCATC | 6 | P | 922 |
| 1411140 | N/A | N/A | 224 | 239 | GATCACTAGTATCTGG | 30 | P | 923 |
| 1411147 | 558798 | 558813 | 7787 | 7802 | GAGACTTAAGAAAACC | 31 | P | 924 |
| 1411148 | 559474 | 559489 | 8463 | 8478 | ATAAATGATATGGTGG | 18 | P | 925 |
| 1411174 | 556622 | 556637 | 5611 | 5626 | CAAACATGGTATACTG | 11 | P | 926 |
| 1411199 | 554972 | 554987 | 3961 | 3976 | TATCAATCTTTCCTCA | 35 | P | 927 |
| 1411229 | 557461 | 557476 | 6450 | 6465 | TACACATAATCCAGGG | 17 | P | 928 |
| 1411323 | 559222 | 559237 | 8211 | 8226 | GCAAAAGATTCACAAG | 20 | P | 929 |
| 1411338 | 554243 | 554258 | 3232 | 3247 | CTAAGTAACTTTTTGC | 28 | P | 930 |
| 1411342 | 556080 | 556095 | 5069 | 5084 | GAGAGTTAAAAGTGAG | 19 | P | 931 |
| 1411378 | 562074 | 562089 | 11063 | 11078 | ACATATGGCACCAGGA | 23 | P | 932 |
| 1411424 | 222045 | 222060 | 1455 | 1470 | TAGTATAAAGAAGTGT | 23 | P | 933 |
| 1411449 | 560726 | 560741 | 9715 | 9730 | CTCAAAGTCAGACACT | 19 | P | 934 |
| 1173403 | 288679 | 288694 | 2074 | 2089 | TCTATTGGAGAAGTGT | 5 | Q | 181 |
| 1408259 | 263006 | 263021 | N/A | N/A | GATATGAATGGTATGA | 3 | Q | 935 |
| | 263047 | 263062 | | | | | | |
| 1408306 | 288678 | 288693 | 2073 | 2088 | CTATTGGAGAAGTGTA | 7 | Q | 936 |
| 1408414 | 217721 | 217736 | 687 | 702 | GAAAGAGGTATTTCTG | 6 | Q | 937 |
| 1408608 | 181172 | 181187 | N/A | N/A | AATTATGTGCAGAAAT | 70 | Q | 938 |
| 1408632 | 225143 | 225158 | N/A | N/A | GATGTTTTAACGCAGA | 5 | Q | 939 |
| 1408677 | 243174 | 243189 | N/A | N/A | ATTATGGCAGGTTGGT | 11 | Q | 940 |
| 1408687 | 249364 | 249379 | N/A | N/A | AAAACAAAGCACAGGT | 78 | Q | 941 |
| 1408730 | 271299 | 271314 | N/A | N/A | CCCCCAACAACCAGCA | 76 | Q | 942 |
| 1408792 | 218142 | 218157 | 1108 | 1123 | CACTTTGGAAGACTCT | 17 | Q | 943 |
| 1409110 | 293105 | 293120 | N/A | N/A | AGCATTAAGGAGAAGG | 13 | Q | 944 |
| 1409133 | 230055 | 230070 | N/A | N/A | GAACTTTTCATTGCAT | 19 | Q | 945 |
| 1409152 | 283490 | 283505 | N/A | N/A | AGTAAGACATGCTCAT | 17 | Q | 946 |
| 1409160 | 541770 | 541785 | N/A | N/A | GAGGAATCAATGAACT | 37 | Q | 947 |
| 1409214 | 290665 | 290680 | 2144 | 2159 | GCATTATTGCACAGGT | 10 | Q | 948 |
| 1409293 | 263338 | 263353 | N/A | N/A | GAAGTTTGAAGAATGC | 4 | Q | 949 |
| 1409324 | 194970 | 194985 | N/A | N/A | ATCTACATTATCTCAG | 57 | Q | 950 |
| 1409358 | 512182 | 512197 | N/A | N/A | GATTATACATTCTGAG | 31 | Q | 951 |
| 1409359 | 182873 | 182888 | N/A | N/A | ATAGTTACAGTAATCT | 37 | Q | 952 |
| 1409362 | 439560 | 439575 | N/A | N/A | ACAAATAGATGCTTCA | 21 | Q | 953 |
| 1409383 | 112419 | 112434 | N/A | N/A | AAGATAGAGAGATTTG | 13 | Q | 954 |
| 1409389 | 82464 | 82479 | N/A | N/A | GAACAATGCTGATTCA | 60 | Q | 955 |
| 1409392 | 206678 | 206693 | N/A | N/A | ACTAAAGTAAGTTCCA | 68 | Q | 956 |
| 1409402 | 235490 | 235505 | N/A | N/A | CTTATTTGGAGTGGTT | 12 | Q | 957 |
| 1409524 | 202577 | 202592 | N/A | N/A | AAACCAGTAACATCCA | 22 | Q | 958 |
| 1409533 | 461061 | 461076 | N/A | N/A | GCAGATTTAAAGTCAA | 22 | Q | 959 |
| 1409544 | 280006 | 280021 | N/A | N/A | CCATATTCTGTAGCAT | 12 | Q | 960 |
| 1409650 | 302424 | 302439 | N/A | N/A | GCTAATCAAGGTATCA | 20 | Q | 961 |
| 1409664 | 480686 | 480701 | N/A | N/A | GAAACAGGTATGTGGG | 44 | Q | 962 |
| 1409678 | 189697 | 189712 | N/A | N/A | TATAGGTATCCTGCAT | 78 | Q | 963 |
| 1409705 | 257386 | 257401 | N/A | N/A | AGACATAATGGTCAAC | 96 | Q | 964 |
| 1409726 | 260441 | 260456 | N/A | N/A | CCCACTAAATTTTTCC | 55 | Q | 965 |
| 1409735 | 190439 | 190454 | N/A | N/A | TCCTTATGACCCCCTG | 36 | Q | 966 |
| 1409768 | 188341 | 188356 | N/A | N/A | CATGATAGTGATTTTC | 50 | Q | 967 |
| 1409777 | 227279 | 227294 | N/A | N/A | AAGTTTAAACTGGGAT | 16 | Q | 968 |
| 1409782 | 367784 | 367799 | N/A | N/A | GAGTAATATGTCAGTG | 11 | Q | 969 |
| 1409785 | 274912 | 274927 | N/A | N/A | ATGAATTTAGTTTGAT | 70 | Q | 970 |
| 1409824 | 222046 | 222061 | 1456 | 1471 | GTAGTATAAAGAAGTG | 5 | Q | 971 |
| 1409914 | 98292 | 98307 | N/A | N/A | ACCTTTAGACAAAGGC | 85 | Q | 972 |
| 1409993 | 310924 | 310939 | N/A | N/A | GCAGTAAAAATCTCCT | 57 | Q | 973 |
| 1410029 | 233963 | 233978 | N/A | N/A | TTAACAATTCCCTTCA | 71 | Q | 974 |
| 1410044 | 69109 | 69124 | N/A | N/A | AGATTTAGGATGGGAG | 107 | Q | 975 |
| 1410052 | 289995 | 290010 | N/A | N/A | TAGTAGGTGATTTCTG | 11 | Q | 976 |
| 1410053 | 393162 | 393177 | N/A | N/A | GTCTATAAAAGCCACA | 36 | Q | 977 |
| 1410064 | 31648 | 31663 | N/A | N/A | GATATAACAGTTCTGT | 67 | Q | 978 |
| 1410109 | 528195 | 528210 | N/A | N/A | ATGAAGACAGTATTGC | 22 | Q | 979 |
| 1410167 | 325799 | 325814 | N/A | N/A | GTTGATAAAAGCCTCA | 5 | Q | 980 |
| 1410175 | 221013 | 221028 | N/A | N/A | TCTATTAAGCATCTCA | 32 | Q | 981 |
| 1410191 | 350180 | 350195 | N/A | N/A | ACATTTGAAATTGACC | 29 | Q | 982 |
| 1410208 | 291181 | 291196 | N/A | N/A | TATCTTAAGTAGATGA | 89 | Q | 983 |
| 1410220 | 165801 | 165816 | N/A | N/A | AGTTATAGTCACTTCC | 8 | Q | 984 |
| 1410247 | 211923 | 211938 | N/A | N/A | CAGTATTACTATTACA | 114 | Q | 985 |
| 1410251 | 132194 | 132209 | N/A | N/A | GTTAATAATGAATGCA | 65 | Q | 986 |
| 1410287 | 244885 | 244900 | N/A | N/A | GAGGTAAAAATATGGT | 9 | Q | 987 |
| 1410305 | 252447 | 252462 | N/A | N/A | TGGGATTAAGTGGAGG | 35 | Q | 988 |
| 1410390 | 268500 | 268515 | N/A | N/A | ATTAGTTAAGACCAGT | 4 | Q | 989 |
| 1410401 | 204974 | 204989 | N/A | N/A | TGAATTTGAGCTCATC | 51 | Q | 990 |
| 1410437 | 149455 | 149470 | N/A | N/A | CCATTAACATACTCCA | 29 | Q | 991 |
| 1410448 | 494592 | 494607 | N/A | N/A | ATGGATTAAACTCCCA | 115 | Q | 992 |
| 1410472 | 209588 | 209603 | N/A | N/A | ATGTTAGAAAGCTCGC | 44 | Q | 993 |
| 1410511 | 427593 | 427608 | N/A | N/A | CAGCTAATGGAGTCAA | 33 | Q | 994 |
| 1410527 | 285372 | 285387 | N/A | N/A | CAGAATAGACTTGGTT | 127 | Q | 995 |
| 1410540 | 407837 | 407852 | N/A | N/A | CATAATTCTGGGTGAA | 29 | Q | 996 |
| 1410582 | 198866 | 198881 | N/A | N/A | TCCTTAAAAACCTCCC | 84 | Q | 997 |
| 1411080 | 560116 | 560131 | 9105 | 9120 | GCAAAACTAAGACCCT | 34 | Q | 998 |
| 1411104 | 457265 | 457280 | 2390 | 2405 | CAATACGACTGATGGT | 14 | Q | 999 |
| 1411131 | 555103 | 555118 | 4092 | 4107 | GATGATGGATTTCTAG | 18 | Q | 1000 |
| 1411136 | 222236 | 222251 | 1646 | 1661 | CACTAGAATAGCCCAT | 9 | Q | 1001 |
| 1411142 | 558841 | 558856 | 7830 | 7845 | CAATACTACAGATACA | 56 | Q | 1002 |
| 1411230 | 562075 | 562090 | 11064 | 11079 | GACATATGGCACCAGG | 12 | Q | 1003 |
| 1411252 | 557462 | 557477 | 6451 | 6466 | TTACACATAATCCAGG | 14 | Q | 1004 |
| 1411305 | 556656 | 556671 | 5645 | 5660 | GAACCTTTAAAGTTGT | 29 | Q | 1005 |
| 1411326 | 554247 | 554262 | 3236 | 3251 | GACTCTAAGTAACTTT | 40 | Q | 1006 |
| 1411371 | 559224 | 559239 | 8213 | 8228 | CTGCAAAAGATTCACA | 26 | Q | 1007 |
| 1411395 | 217278 | 217293 | 244 | 259 | GAGTAAAGTGCTTCCT | 7 | Q | 1008 |
| 1411406 | 560775 | 560790 | 9764 | 9779 | AAGAATGTGATATGGA | 12 | Q | 1009 |
| 1411421 | 556083 | 556098 | 5072 | 5087 | GCAGAGAGTTAAAAGT | 31 | Q | 1010 |
| 1411439 | 559477 | 559492 | 8466 | 8481 | TACATAAATGATATGG | 41 | Q | 1011 |
| 1173403 | 288679 | 288694 | 2074 | 2089 | TCTATTGGAGAAGTGT | 5 | R | 181 |
| 1408258 | 263007 | 263022 | N/A | N/A | TGATATGAATGGTATG | 7 | R | 1012 |
| | 263048 | 263063 | | | | | | |
| 1408305 | 288681 | 288696 | 2076 | 2091 | TATCTATTGGAGAAGT | 4 | R | 1013 |
| 1408488 | 222072 | 222087 | 1482 | 1497 | TATAATGTCTCCAGGG | 22 | R | 1014 |
| 1408574 | 290667 | 290682 | 2146 | 2161 | AAGCATTATTGCACAG | 13 | R | 1015 |
| 1408607 | 181182 | 181197 | N/A | N/A | AATACTCCATAATTAT | 69 | R | 1016 |
| 1408619 | 188418 | 188433 | N/A | N/A | AGCCTAAGTCTTGATT | 80 | R | 1017 |
| 1408628 | 189698 | 189713 | N/A | N/A | TTATAGGTATCCTGCA | 58 | R | 1018 |
| 1408676 | 243184 | 243199 | N/A | N/A | GAAATTACAGATTATG | 73 | R | 1019 |
| 1408686 | 249374 | 249389 | N/A | N/A | GCAGATGAGGAAAACA | 69 | R | 1020 |
| 1408729 | 271319 | 271334 | N/A | N/A | ATAATGTCCTCTCCAT | 40 | R | 1021 |
| 1408781 | 218162 | 218177 | 1128 | 1143 | GATGAGATGAGATGGC | 8 | R | 1022 |
| 1409102 | 100338 | 100353 | N/A | N/A | CTTACATAACTTGCAT | 50 | R | 1023 |
| 1409116 | 230797 | 230812 | N/A | N/A | TGTCAATGAGTAGCAG | 30 | R | 1024 |
| 1409138 | 427603 | 427618 | N/A | N/A | AAGAATTAGTCAGCTA | 53 | R | 1025 |
| 1409149 | 512545 | 512560 | N/A | N/A | CTACTAGTTTATCCCC | 30 | R | 1026 |
| 1409162 | 530289 | 530304 | N/A | N/A | GATTTAGGCTTTCCAA | 19 | R | 1027 |
| 1409177 | 221014 | 221029 | N/A | N/A | ATCTATTAAGCATCTC | 38 | R | 1028 |
| 1409248 | 205140 | 205155 | N/A | N/A | CAATTTCAGAGGCAGC | 36 | R | 1029 |
| 1409264 | 326728 | 326743 | N/A | N/A | TATATGATTATGAGGA | 5 | R | 1030 |
| 1409274 | 289996 | 290011 | N/A | N/A | ATAGTAGGTGATTTCT | 11 | R | 1031 |
| 1409306 | 257387 | 257402 | N/A | N/A | CAGACATAATGGTCAA | 79 | R | 1032 |
| 1409313 | 439594 | 439609 | N/A | N/A | AATTATCAGCAGGCTG | 92 | R | 1033 |
| 1409364 | 393173 | 393188 | N/A | N/A | GTCCAATAGAAGTCTA | 17 | R | 1034 |
| 1409366 | 69115 | 69130 | N/A | N/A | GTAACAAGATTTAGGA | 96 | R | 1035 |
| 1409385 | 302930 | 302945 | N/A | N/A | TACTATTATTCAGGCA | 10 | R | 1036 |
| 1409410 | 245068 | 245083 | N/A | N/A | TACAATGATCAGTTCA | 6 | R | 1037 |
| 1409471 | 311381 | 311396 | N/A | N/A | TACTATGATGTGTTCT | 89 | R | 1038 |
| 1409519 | 182956 | 182971 | N/A | N/A | ATAGTTGTACAATGTA | 8 | R | 1039 |
| 1409534 | 82471 | 82486 | N/A | N/A | CTCTATTGAACAATGC | 5 | R | 1040 |
| 1409630 | 543336 | 543351 | N/A | N/A | ATCTATTATCCTCAGG | 38 | R | 1041 |
| 1409631 | 275129 | 275144 | N/A | N/A | ATTAGTATCAGTGTAT | 31 | R | 1042 |
| 1409632 | 165802 | 165817 | N/A | N/A | AAGTTATAGTCACTTC | 93 | R | 1043 |
| 1409677 | 31672 | 31687 | N/A | N/A | TAGCATTAATGAGTTG | 100 | R | 1044 |
| 1409739 | 209589 | 209604 | N/A | N/A | CATGTTAGAAAGCTCG | 79 | R | 1045 |
| 1409790 | 285373 | 285388 | N/A | N/A | ACAGAATAGACTTGGT | 95 | R | 1046 |
| 1409795 | 263345 | 263360 | N/A | N/A | TATCTTTGAAGTTTGA | 18 | R | 1047 |
| 1409879 | 190449 | 190464 | N/A | N/A | GCCTTAATGGTCCTTA | 80 | R | 1048 |
| 1409882 | 252458 | 252473 | N/A | N/A | TCATAGGTAACTGGGA | 30 | R | 1049 |
| 1409883 | 112504 | 112519 | N/A | N/A | GCTTTATTACTAATCA | 5 | R | 1050 |
| 1409964 | 283492 | 283507 | N/A | N/A | GAAGTAAGACATGCTC | 20 | R | 1051 |
| 1409966 | 227343 | 227358 | N/A | N/A | TCACTAATGTCACATT | 12 | R | 1052 |
| 1409977 | 350509 | 350524 | N/A | N/A | TTTATTATAGGGTTGA | 3 | R | 1053 |
| 1409989 | 407842 | 407857 | N/A | N/A | ACAACCATAATTCTGG | 37 | R | 1054 |
| 1410042 | 268501 | 268516 | N/A | N/A | AATTAGTTAAGACCAG | 7 | R | 1055 |
| 1410060 | 198867 | 198882 | N/A | N/A | ATCCTTAAAAACCTCC | 55 | R | 1056 |
| 1410126 | 494990 | 495005 | N/A | N/A | TTGTAATAGTGGTGTG | 11 | R | 1057 |
| 1410148 | 481051 | 481066 | N/A | N/A | TCAAAATCTTGTCCTG | 27 | R | 1058 |
| 1410154 | 194977 | 194992 | N/A | N/A | GTTACATATCTACATT | 60 | R | 1059 |
| 1410156 | 368427 | 368442 | N/A | N/A | GATATTGTATAAGGTT | 6 | R | 1060 |
| 1410186 | 291248 | 291263 | N/A | N/A | GCTAAAATTCTACTTC | 50 | R | 1061 |
| 1410248 | 235491 | 235506 | N/A | N/A | GCTTATTTGGAGTGGT | 6 | R | 1062 |
| 1410252 | 293136 | 293151 | N/A | N/A | AAGTAATGGGTGGTCA | 43 | R | 1063 |
| 1410260 | 202578 | 202593 | N/A | N/A | AAAACCAGTAACATCC | 39 | R | 1064 |
| 1410316 | 212095 | 212110 | N/A | N/A | GCAGTAAGTGAAATCT | 54 | R | 1065 |
| 1410320 | 233964 | 233979 | N/A | N/A | GTTAACAATTCCCTTC | 72 | R | 1066 |
| 1410374 | 280173 | 280188 | N/A | N/A | GCCTATAATCTACTGA | 57 | R | 1067 |
| 1410378 | 133252 | 133267 | N/A | N/A | TTTACATATATCCCTC | 46 | R | 1068 |
| 1410396 | 149998 | 150013 | N/A | N/A | CATGATTAAAAGTGTA | 90 | R | 1069 |
| 1410415 | 206769 | 206784 | N/A | N/A | TACATTTAATGCCTAC | 58 | R | 1070 |
| 1410421 | 461281 | 461296 | N/A | N/A | GCTATAAGGGTCTCAA | 33 | R | 1071 |
| 1410427 | 217303 | 217318 | 269 | 284 | GAAATTCATTTGTGAC | 11 | R | 1072 |
| 1410456 | 225179 | 225194 | N/A | N/A | AATACCTCAATGTCCA | 6 | R | 1073 |
| 1410465 | 260563 | 260578 | N/A | N/A | TAGAATGGATGTCATT | 32 | R | 1074 |
| 1410535 | 457266 | 457281 | 2391 | 2406 | CCAATACGACTGATGG | 57 | R | 1075 |
| 1411101 | 558842 | 558857 | 7831 | 7846 | GCAATACTACAGATAC | 26 | R | 1076 |
| 1411149 | 559515 | 559530 | 8504 | 8519 | CACGAGAGTGGTTTGA | 66 | R | 1077 |
| 1411235 | 554288 | 554303 | 3277 | 3292 | CCCTATTTTGCTCCAT | 14 | R | 1078 |
| 1411236 | 556093 | 556108 | 5082 | 5097 | CCCAAACAAGGCAGAG | 34 | R | 1079 |
| 1411276 | 562102 | 562117 | 11091 | 11106 | CACTAATTACTTTCAC | 35 | R | 1080 |
| 1411345 | 557522 | 557537 | 6511 | 6526 | CACAAGACCACTGCAC | 68 | R | 1081 |
| 1411351 | 560142 | 560157 | 9131 | 9146 | AATAATTCTTAGAAGG | 68 | R | 1082 |
| 1411355 | 217723 | 217738 | 689 | 704 | CTGAAAGAGGTATTTC | 12 | R | 1083 |
| 1411366 | 222307 | 222322 | 1717 | 1732 | CCAGAAAGCAATCTCC | 42 | R | 1084 |
| 1411399 | 556793 | 556808 | 5782 | 5797 | GCATAAACTCTTGGCC | 82 | R | 1085 |
| 1411405 | 560795 | 560810 | 9784 | 9799 | CAATTTGGTGGTCCAC | 33 | R | 1086 |
| 1411418 | 555156 | 555171 | 4145 | 4160 | CATATGTAGAGTAAGA | 81 | R | 1087 |
| 1411425 | 559234 | 559249 | 8223 | 8238 | ACACAGTACACTGCAA | 40 | R | 1088 |
| 1173403 | 288679 | 288694 | 2074 | 2089 | TCTATTGGAGAAGTGT | 6 | s | 181 |
| 1408253 | 249391 | 249406 | N/A | N/A | ATTAGTATGTCCACCT | 22 | s | 1089 |
| 1408257 | 263008 | 263023 | N/A | N/A | GTGATATGAATGGTAT | 4 | s | 1090 |
| | 263049 | 263064 | | | | | | |
| 1408303 | 288682 | 288697 | 2077 | 2092 | ATATCTATTGGAGAAG | 14 | s | 1091 |
| 1408606 | 181192 | 181207 | N/A | N/A | GTACACAGCAAATACT | 72 | s | 1092 |
| 1408618 | 188448 | 188463 | N/A | N/A | TTCTATCATTGCAGTT | 55 | s | 1093 |
| 1408631 | 225183 | 225198 | N/A | N/A | GCTTAATACCTCAATG | 53 | s | 1094 |
| 1408674 | 243194 | 243209 | N/A | N/A | CATGAAGAGGGAAATT | 88 | s | 1095 |
| 1408728 | 271329 | 271344 | N/A | N/A | AATTTAGTGAATAATG | 101 | s | 1096 |
| 1408774 | 218172 | 218187 | 1138 | 1153 | CAAACCAGCTGATGAG | 8 | s | 1097 |
| 1408780 | 217751 | 217766 | 717 | 732 | TAAAAACTTTCCTCCG | 7 | s | 1098 |
| 1409106 | 199112 | 199127 | N/A | N/A | CATTTTGAGATTCCTG | 46 | s | 1099 |
| 1409125 | 543337 | 543352 | N/A | N/A | GATCTATTATCCTCAG | 33 | s | 1100 |
| 1409132 | 328985 | 329000 | N/A | N/A | GAACTAGTTTGCTTCC | 57 | s | 1101 |
| 1409144 | 289997 | 290012 | N/A | N/A | TATAGTAGGTGATTTC | 12 | s | 1102 |
| 1409239 | 165908 | 165923 | N/A | N/A | AAGTAGTTAAGGCTAC | 77 | s | 1103 |
| 1409245 | 205217 | 205232 | N/A | N/A | CATACTAATGATTCAG | 31 | s | 1104 |
| 1409247 | 512696 | 512711 | N/A | N/A | CCAAATTTGGTAAGGT | 94 | s | 1105 |
| 1409303 | 206793 | 206808 | N/A | N/A | ACAATATCTACAAGTC | 82 | s | 1106 |
| 1409334 | 368466 | 368481 | N/A | N/A | GACAATAATGCAATGT | 74 | s | 1107 |
| 1409339 | 252459 | 252474 | N/A | N/A | CTCATAGGTAACTGGG | 69 | s | 1108 |
| 1409352 | 227888 | 227903 | N/A | N/A | GTATTTAATGAGCTCC | 18 | s | 1109 |
| 1409353 | 408274 | 408289 | N/A | N/A | AATGATTAGGGTCACT | 17 | s | 1110 |
| 1409368 | 291259 | 291274 | N/A | N/A | TTCGAGTAAATGCTAA | 43 | s | 1111 |
| 1409372 | 439597 | 439612 | N/A | N/A | CCAAATTATCAGCAGG | 35 | s | 1112 |
| 1409373 | 530294 | 530309 | N/A | N/A | CTTTAGATTTAGGCTT | 44 | s | 1113 |
| 1409374 | 245070 | 245085 | N/A | N/A | GTTACAATGATCAGTT | 11 | s | 1114 |
| 1409379 | 101776 | 101791 | N/A | N/A | TAAAACATGTGAGTCC | 12 | s | 1115 |
| 1409439 | 190487 | 190502 | N/A | N/A | CACTAACAATTCTTTC | 82 | s | 1116 |
| 1409444 | 150062 | 150077 | N/A | N/A | GTAAGATAAGCATTGT | 25 | s | 1117 |
| 1409464 | 428079 | 428094 | N/A | N/A | CACATTAGAGAATGTA | 94 | s | 1118 |
| 1409483 | 231341 | 231356 | N/A | N/A | CTCAATGAGGTTCACA | 50 | s | 1119 |
| 1409505 | 183359 | 183374 | N/A | N/A | TCAGAAGTGGTAGTAT | 15 | s | 1120 |
| 1409582 | 481052 | 481067 | N/A | N/A | ATCAAAATCTTGTCCT | 44 | s | 1121 |
| 1409633 | 113211 | 113226 | N/A | N/A | TCAATAAACAGTACCA | 32 | s | 1122 |
| 1409716 | 280374 | 280389 | N/A | N/A | AGTTTAACTAGGCATC | 24 | S | 1123 |
| 1409741 | 235758 | 235773 | N/A | N/A | AGTACAAACTGCTACA | 83 | S | 1124 |
| 1409873 | 303207 | 303222 | N/A | N/A | GACTAGCTGAAGTTGC | 40 | S | 1125 |
| 1409886 | 350545 | 350560 | N/A | N/A | TCTATAGAGAACCAGA | 97 | S | 1126 |
| 1409932 | 261566 | 261581 | N/A | N/A | CCACATTCAAGCTTCG | 17 | S | 1127 |
| 1409983 | 222358 | 222373 | N/A | N/A | CCTACAAAAACCACCA | 57 | S | 1128 |
| 1410002 | 83080 | 83095 | N/A | N/A | GCAGATTCAAAGAGGG | 31 | S | 1129 |
| 1410024 | 275131 | 275146 | N/A | N/A | GAATTAGTATCAGTGT | 10 | S | 1130 |
| 1410054 | 313760 | 313775 | N/A | N/A | TACTATATTGGTTACC | 34 | S | 1131 |
| 1410072 | 202625 | 202640 | N/A | N/A | TTTAATGGGTGATTGC | 32 | S | 1132 |
| 1410075 | 283494 | 283509 | N/A | N/A | TGGAAGTAAGACATGC | 12 | s | 1133 |
| 1410091 | 189699 | 189714 | N/A | N/A | CTTATAGGTATCCTGC | 27 | s | 1134 |
| 1410100 | 263405 | 263420 | N/A | N/A | TACCATCAAAGAAGGA | 31 | s | 1135 |
| 1410114 | 70523 | 70538 | N/A | N/A | TTCAATAAGCGGGCTG | 97 | s | 1136 |
| 1410115 | 234584 | 234599 | N/A | N/A | AGTCAAAATGCCCATA | 29 | s | 1137 |
| 1410119 | 393352 | 393367 | N/A | N/A | ATAAGTATCACAGTCA | 5 | s | 1138 |
| 1410152 | 222073 | 222088 | 1483 | 1498 | GTATAATGTCTCCAGG | 9 | s | 1139 |
| 1410192 | 209649 | 209664 | N/A | N/A | ATGTACTAAACACAGG | 62 | s | 1140 |
| 1410205 | 221096 | 221111 | N/A | N/A | AGCTATATCACTTGAA | 88 | s | 1141 |
| 1410243 | 195252 | 195267 | N/A | N/A | GACAATCGGAACTCCC | 30 | s | 1142 |
| 1410304 | 461282 | 461297 | N/A | N/A | TGCTATAAGGGTCTCA | 30 | s | 1143 |
| 1410323 | 293137 | 293152 | N/A | N/A | CAAGTAATGGGTGGTC | 19 | s | 1144 |
| 1410399 | 285374 | 285389 | N/A | N/A | AACAGAATAGACTTGG | 96 | s | 1145 |
| 1410416 | 257465 | 257480 | N/A | N/A | ACCAATAACATGTCAA | 96 | s | 1146 |
| 1410458 | 268502 | 268517 | N/A | N/A | GAATTAGTTAAGACCA | 6 | s | 1147 |
| 1410477 | 133466 | 133481 | N/A | N/A | TCAATTTAAGGAAAGG | 23 | s | 1148 |
| 1410484 | 212633 | 212648 | N/A | N/A | GTAGAAATCCAACTTC | 74 | s | 1149 |
| 1410529 | 33387 | 33402 | N/A | N/A | CTACATATTATGTCTG | 114 | s | 1150 |
| 1410546 | 495082 | 495097 | N/A | N/A | ATATTTCAATCTCAGG | 8 | s | 1151 |
| 1411119 | 559517 | 559532 | 8506 | 8521 | ACCACGAGAGTGGTTT | 98 | s | 1152 |
| 1411128 | 290671 | 290686 | 2150 | 2165 | TAAGAAGCATTATTGC | 66 | s | 1153 |
| 1411132 | 555157 | 555172 | 4146 | 4161 | ACATATGTAGAGTAAG | 64 | s | 1154 |
| 1411143 | 217313 | 217328 | 279 | 294 | CCATATTCTGGAAATT | 23 | s | 1155 |
| 1411154 | 457268 | 457283 | 2393 | 2408 | TTCCAATACGACTGAT | 36 | s | 1156 |
| 1411232 | 556795 | 556810 | 5784 | 5799 | TAGCATAAACTCTTGG | 28 | s | 1157 |
| 1411233 | 560882 | 560897 | 9871 | 9886 | AAAATGATGCACACCA | 27 | s | 1158 |
| 1411244 | 558844 | 558859 | 7833 | 7848 | CTGCAATACTACAGAT | 101 | s | 1159 |
| 1411320 | 557544 | 557559 | 6533 | 6548 | GCATAGAGGGTCTTGT | 71 | s | 1160 |
| 1411322 | 554291 | 554306 | 3280 | 3295 | AAACCCTATTTTGCTC | 50 | s | 1161 |
| 1411353 | 560145 | 560160 | 9134 | 9149 | CACAATAATTCTTAGA | 68 | s | 1162 |
| 1411374 | 556095 | 556110 | 5084 | 5099 | TACCCAAACAAGGCAG | 43 | s | 1163 |
| 1411393 | 562199 | 562214 | 11188 | 11203 | GAACAGGTTTCCAGTA | 71 | s | 1164 |
| 1411410 | 559267 | 559282 | 8256 | 8271 | CCAAATTACAGGGAGC | 31 | s | 1165 |
| 1173403 | 288679 | 288694 | 2074 | 2089 | TCTATTGGAGAAGTGT | 4 | T | 181 |
| 1408252 | 249392 | 249407 | N/A | N/A | TATTAGTATGTCCACC | 37 | T | 1166 |
| 1408256 | 263010 | 263025 | N/A | N/A | AAGTGATATGAATGGT | 3 | T | 1167 |
| | 263051 | 263066 | | | | | | |
| 1408309 | 288683 | 288698 | 2078 | 2093 | AATATCTATTGGAGAA | 8 | T | 1168 |
| 1408314 | 290674 | 290689 | 2153 | 2168 | TATTAAGAAGCATTAT | 90 | T | 1169 |
| 1408476 | 222092 | 222107 | 1502 | 1517 | AATAGCTATCAGGCTC | 28 | T | 1170 |
| 1408605 | 181202 | 181217 | N/A | N/A | GCAATATTGGGTACAC | 5 | T | 1171 |
| 1408617 | 188498 | 188513 | N/A | N/A | TGTATATCCTTTGTTC | 34 | T | 1172 |
| 1408630 | 225223 | 225238 | N/A | N/A | ATTCTAACACTTGGGC | 6 | T | 1173 |
| 1408673 | 243254 | 243269 | N/A | N/A | AAACCGACTGGTCTCA | 80 | T | 1174 |
| 1408766 | 218182 | 218197 | 1148 | 1163 | TTGAATTACACAAACC | 4 | T | 1175 |
| 1409195 | 206799 | 206814 | N/A | N/A | ACTACAACAATATCTA | 69 | T | 1176 |
| 1409242 | 189700 | 189715 | N/A | N/A | TCTTATAGGTATCCTG | 36 | T | 1177 |
| 1409244 | 495277 | 495292 | N/A | N/A | TACATAACATGACACA | 34 | T | 1178 |
| 1409254 | 209666 | 209681 | N/A | N/A | AATATTGATTACCTGC | 66 | T | 1179 |
| 1409287 | 202726 | 202741 | N/A | N/A | ACAAATCCTGCTTTGC | 62 | T | 1180 |
| 1409295 | 293139 | 293154 | N/A | N/A | ATCAAGTAATGGGTGG | 6 | T | 1181 |
| 1409297 | 290000 | 290015 | N/A | N/A | TAGTATAGTAGGTGAT | 13 | T | 1182 |
| 1409318 | 263461 | 263476 | N/A | N/A | AAGATTATTCCTCAAG | 18 | T | 1183 |
| 1409325 | 33485 | 33500 | N/A | N/A | GCAAATGAAGATATGT | 93 | T | 1184 |
| 1409367 | 291270 | 291285 | N/A | N/A | ATTATGAAGAGTTCGA | 22 | T | 1185 |
| 1409380 | 261665 | 261680 | N/A | N/A | CCATTGAAGGCTTTGT | 18 | T | 1186 |
| 1409390 | 234665 | 234680 | N/A | N/A | CTAGAGAAGTTCTTCC | 52 | T | 1187 |
| 1409416 | 252562 | 252577 | N/A | N/A | CATACGCCAAGCTCAA | 26 | T | 1188 |
| 1409427 | 221246 | 221261 | N/A | N/A | ACAATTAATATGCAGC | 26 | T | 1189 |
| 1409447 | 271422 | 271437 | N/A | N/A | GACATAAGCTGGAACA | 36 | T | 1190 |
| 1409452 | 231724 | 231739 | N/A | N/A | GTCTAAAAACAACAGT | 62 | T | 1191 |
| 1409463 | 183363 | 183378 | N/A | N/A | CAAATCAGAAGTGGTA | 19 | T | 1192 |
| 1409482 | 481053 | 481068 | N/A | N/A | CATCAAAATCTTGTCC | 60 | T | 1193 |
| 1409492 | 303318 | 303333 | N/A | N/A | ATTAGTACAATCATCC | 33 | T | 1194 |
| 1409506 | 280375 | 280390 | N/A | N/A | AAGTTTAACTAGGCAT | 47 | T | 1195 |
| 1409575 | 313762 | 313777 | N/A | N/A | CATACTATATTGGTTA | 59 | T | 1196 |
| 1409607 | 101811 | 101826 | N/A | N/A | ACTAGAAAAGCTGCTT | 61 | T | 1197 |
| 1409662 | 283507 | 283522 | N/A | N/A | CTTTATCTTAACTTGG | 25 | T | 1198 |
| 1409680 | 275133 | 275148 | N/A | N/A | TTGAATTAGTATCAGT | 26 | T | 1199 |
| 1409684 | 544385 | 544400 | N/A | N/A | AAAAGTTTGTCACTCA | 9 | T | 1200 |
| 1409771 | 350573 | 350588 | N/A | N/A | CATGTAAATACAGTGC | 26 | T | 1201 |
| 1409805 | 222523 | 222538 | N/A | N/A | CAGACTAAAATGATCA | 58 | T | 1202 |
| 1409814 | 227929 | 227944 | N/A | N/A | ATAACTTTTCTTTGGG | 7 | T | 1203 |
| 1409830 | 150248 | 150263 | N/A | N/A | GAATTTTATCAGACTA | 68 | T | 1204 |
| 1409850 | 166321 | 166336 | N/A | N/A | GTATACTATCTAGGTT | 52 | T | 1205 |
| 1409930 | 408278 | 408293 | N/A | N/A | AGTCAATGATTAGGGT | 9 | T | 1206 |
| 1409994 | 512860 | 512875 | N/A | N/A | TTCTAGATAGTTTGTA | 48 | T | 1207 |
| 1410007 | 530296 | 530311 | N/A | N/A | AGCTTTAGATTTAGGC | 77 | T | 1208 |
| 1410057 | 205218 | 205233 | N/A | N/A | ACATACTAATGATTCA | 51 | T | 1209 |
| 1410065 | 370021 | 370036 | N/A | N/A | ATATTTCTCATATCGA | 31 | T | 1210 |
| 1410092 | 393466 | 393481 | N/A | N/A | TGTTAAGATACATTCC | 13 | T | 1211 |
| 1410103 | 83460 | 83475 | N/A | N/A | GAATTTCACACTGCTA | 14 | T | 1212 |
| 1410106 | 439598 | 439613 | N/A | N/A | CCCAAATTATCAGCAG | 21 | T | 1213 |
| 1410177 | 134400 | 134415 | N/A | N/A | GTTTATGAAAATCTCC | 42 | T | 1214 |
| 1410228 | 245085 | 245100 | N/A | N/A | TTTCATACAAAGCTGG | 24 | T | 1215 |
| 1410278 | 428707 | 428722 | N/A | N/A | AAGAATTATGACACCA | 26 | T | 1216 |
| 1410280 | 199260 | 199275 | N/A | N/A | GCTAAGCTCATTGTCT | 63 | T | 1217 |
| 1410295 | 461352 | 461367 | N/A | N/A | AGTTTTAGAACATAGA | 30 | T | 1218 |
| 1410413 | 212635 | 212650 | N/A | N/A | AAGTAGAAATCCAACT | 93 | T | 1219 |
| 1410429 | 268503 | 268518 | N/A | N/A | TGAATTAGTTAAGACC | 12 | T | 1220 |
| 1410432 | 285551 | 285566 | N/A | N/A | TAAGATTCTAGCTAGA | 76 | T | 1221 |
| 1410462 | 257466 | 257481 | N/A | N/A | CACCAATAACATGTCA | 72 | T | 1222 |
| 1410476 | 235849 | 235864 | N/A | N/A | TTGAAGAGCATTCTCC | 51 | T | 1223 |
| 1410514 | 71847 | 71862 | N/A | N/A | GTTGAATAGATAGCCC | 88 | T | 1224 |
| 1410548 | 190488 | 190503 | N/A | N/A | GCACTAACAATTCTTT | 47 | T | 1225 |
| 1410575 | 329443 | 329458 | N/A | N/A | GATTTATCGATGTCAC | 5 | T | 1226 |
| 1410578 | 113538 | 113553 | N/A | N/A | ATTACTAATGTTTACC | 31 | T | 1227 |
| 1410581 | 195410 | 195425 | N/A | N/A | TCTAAACTTGAACTGG | 53 | T | 1228 |
| 1411081 | 560234 | 560249 | 9223 | 9238 | TCAAATGGTTAAGGCC | 18 | T | 1229 |
| 1411082 | 457277 | 457292 | 2402 | 2417 | TAGTAGTACTTCCAAT | 34 | T | 1230 |
| 1411086 | 217416 | 217431 | 382 | 397 | AGTAAGAGGCTGGACA | 80 | T | 1231 |
| 1411090 | 559268 | 559283 | 8257 | 8272 | CCCAAATTACAGGGAG | 89 | T | 1232 |
| 1411150 | 557566 | 557581 | 6555 | 6570 | GATTAGGATAACAGTT | 16 | T | 1233 |
| 1411206 | 554292 | 554307 | 3281 | 3296 | AAAACCCTATTTTGCT | 68 | T | 1234 |
| 1411224 | 556798 | 556813 | 5787 | 5802 | CCATAGCATAAACTCT | 35 | T | 1235 |
| 1411271 | 558912 | 558927 | 7901 | 7916 | AACAATGGCAGGTGAC | 30 | T | 1236 |
| 1411291 | 562274 | 562289 | 11263 | 11278 | TTCAAAAGAAGACCAC | 85 | T | 1237 |
| 1411309 | 556097 | 556112 | 5086 | 5101 | TTTACCCAAACAAGGC | 36 | T | 1238 |
| 1411312 | 560883 | 560898 | 9872 | 9887 | GAAAATGATGCACACC | 16 | T | 1239 |
| 1411315 | 559537 | 559552 | 8526 | 8541 | CAAGCGAGTACGGATG | 15 | T | 1240 |
| 1411317 | 217789 | 217804 | 755 | 770 | CAGTTAACAGCGCGGT | 6 | T | 1241 |
| 1411431 | 555158 | 555173 | 4147 | 4162 | CACATATGTAGAGTAA | 41 | T | 1242 |
| 1173403 | 288679 | 288694 | 2074 | 2089 | TCTATTGGAGAAGTGT | 6 | U | 181 |
| 1408247 | 243311 | 243326 | N/A | N/A | ATTAAAAGACGGCCTC | 80 | U | 1243 |
| 1408251 | 249393 | 249408 | N/A | N/A | TTATTAGTATGTCCAC | 16 | U | 1244 |
| 1408255 | 263011 | 263026 | N/A | N/A | AAAGTGATATGAATGG | 4 | U | 1245 |
| | 263052 | 263067 | | | | | | |
| 1408313 | 290675 | 290690 | 2154 | 2169 | GTATTAAGAAGCATTA | 58 | U | 1246 |
| 1408546 | 288709 | 288724 | 2104 | 2119 | AGCAATGGTATCTGGG | 15 | U | 1247 |
| 1408604 | 181212 | 181227 | N/A | N/A | GCAATGACTAGCAATA | 29 | U | 1248 |
| 1408616 | 188548 | 188563 | N/A | N/A | TAGGCGAGAACACACT | 44 | U | 1249 |
| 1408758 | 218192 | 218207 | 1158 | 1173 | GTTAAACTACTTGAAT | 62 | U | 1250 |
| 1409089 | 102832 | 102847 | N/A | N/A | AAGATATACAACACTC | 16 | U | 1251 |
| 1409092 | 330574 | 330589 | N/A | N/A | GCAAATTGTGTTCAGT | 6 | u | 1252 |
| 1409105 | 276132 | 276147 | N/A | N/A | ATGTAAGATGTCTGGC | 20 | U | 1253 |
| 1409130 | 481056 | 481071 | N/A | N/A | CTACATCAAAATCTTG | 87 | U | 1254 |
| 1409141 | 313763 | 313778 | N/A | N/A | CCATACTATATTGGTT | 64 | U | 1255 |
| 1409199 | 530297 | 530312 | N/A | N/A | AAGCTTTAGATTTAGG | 50 | U | 1256 |
| 1409259 | 497352 | 497367 | N/A | N/A | GCATAAATGATCCAGG | 53 | U | 1257 |
| 1409262 | 285988 | 286003 | N/A | N/A | TTTTATCCAGATTTGC | 91 | U | 1258 |
| 1409263 | 199262 | 199277 | N/A | N/A | TAGCTAAGCTCATTGT | 88 | U | 1259 |
| 1409288 | 195435 | 195450 | N/A | N/A | CCAGAACAGACATCTG | 96 | U | 1260 |
| 1409329 | 212636 | 212651 | N/A | N/A | GAAGTAGAAATCCAAC | 63 | U | 1261 |
| 1409381 | 253244 | 253259 | N/A | N/A | GCAAATGCTATGACAA | 8 | U | 1262 |
| 1409405 | 280527 | 280542 | N/A | N/A | CATACTAAGATTGGCA | 9 | U | 1263 |
| 1409443 | 544390 | 544405 | N/A | N/A | AGGATAAAAGTTTGTC | 14 | U | 1264 |
| 1409490 | 207000 | 207015 | N/A | N/A | CTATTTGAAAGTGCTG | 44 | u | 1265 |
| 1409508 | 441384 | 441399 | N/A | N/A | GAAAATTTGCAGCAGG | 27 | u | 1266 |
| 1409511 | 189701 | 189716 | N/A | N/A | TTCTTATAGGTATCCT | 24 | u | 1267 |
| 1409512 | 351591 | 351606 | N/A | N/A | GAATTACAATGTTCTA | 32 | u | 1268 |
| 1409523 | 394249 | 394264 | N/A | N/A | GAATTTATCTACCTTG | 37 | u | 1269 |
| 1409526 | 150250 | 150265 | N/A | N/A | TAGAATTTTATCAGAC | 102 | u | 1270 |
| 1409579 | 222652 | 222667 | N/A | N/A | AAGCTACGATCTCTCA | 34 | u | 1271 |
| 1409588 | 291271 | 291286 | N/A | N/A | TATTATGAAGAGTTCG | 44 | u | 1272 |
| 1409619 | 231767 | 231782 | N/A | N/A | AGTTAGGTTTACGCTG | 44 | u | 1273 |
| 1409647 | 209669 | 209684 | N/A | N/A | GCAAATATTGATTACC | 49 | u | 1274 |
| 1409703 | 190755 | 190770 | N/A | N/A | GAATTTCTCTGATATC | 71 | u | 1275 |
| 1409711 | 562291 | 562306 | 11280 | 11295 | CACAAATTACTGTTCC | 33 | u | 1276 |
| 1409721 | 513274 | 513289 | N/A | N/A | GTAACTTAGATTCCAG | 12 | u | 1277 |
| 1409738 | 408344 | 408359 | N/A | N/A | TCAGTAATTTAGGGTA | 11 | u | 1278 |
| 1409784 | 72590 | 72605 | N/A | N/A | GCTTTATCAAGATCCA | 86 | u | 1279 |
| 1409831 | 257696 | 257711 | N/A | N/A | GCACAGAGGTCATCTA | 46 | u | 1280 |
| 1409838 | 83468 | 83483 | N/A | N/A | AACCATGAGAATTTCA | 21 | u | 1281 |
| 1409897 | 205253 | 205268 | N/A | N/A | ATAGTTACAGCTGTGC | 42 | u | 1282 |
| 1409933 | 167586 | 167601 | N/A | N/A | GAGATTAAAGTTCTCA | 101 | u | 1283 |
| 1409936 | 263463 | 263478 | N/A | N/A | ATAAGATTATTCCTCA | 22 | u | 1284 |
| 1409951 | 271615 | 271630 | N/A | N/A | GCTATACATGATCTTA | 26 | u | 1285 |
| 1409959 | 245272 | 245287 | N/A | N/A | GTTAGTTAGAAGCACA | 28 | u | 1286 |
| 1410035 | 114511 | 114526 | N/A | N/A | CCATTTACAACTATGG | 84 | u | 1287 |
| 1410038 | 135027 | 135042 | N/A | N/A | ATAACATCAAGGTGCA | 49 | u | 1288 |
| 1410041 | 290002 | 290017 | N/A | N/A | TTTAGTATAGTAGGTG | 7 | u | 1289 |
| 1410048 | 462958 | 462973 | N/A | N/A | GCTATAGAAACTGCCC | 75 | u | 1290 |
| 1410069 | 262462 | 262477 | N/A | N/A | TGGTATTATGGAAGGT | 8 | u | 1291 |
| 1410101 | 234697 | 234712 | N/A | N/A | GCAGTAATTTTATTCC | 8 | u | 1292 |
| 1410143 | 225419 | 225434 | N/A | N/A | GAATTCATTAGTCTTA | 32 | u | 1293 |
| 1410149 | 183364 | 183379 | N/A | N/A | TCAAATCAGAAGTGGT | 16 | u | 1294 |
| 1410187 | 34822 | 34837 | N/A | N/A | CATAGAATAGTCTTGC | 95 | u | 1295 |
| 1410226 | 293430 | 293445 | N/A | N/A | GAAATTAGCAGGCCAA | 65 | u | 1296 |
| 1410326 | 556820 | 556835 | 5809 | 5824 | GCAAATCAGTGACTGT | 19 | u | 1297 |
| 1410336 | 370456 | 370471 | N/A | N/A | ACTATAGAATCTCACT | 35 | u | 1298 |
| 1410350 | 283526 | 283541 | N/A | N/A | GATACATTAATTTCCA | 15 | U | 1299 |
| 1410452 | 221479 | 221494 | N/A | N/A | GATTTAAATAAGGCCA | 84 | U | 1300 |
| 1410475 | 268885 | 268900 | N/A | N/A | TATAGGTCATGACATT | 40 | U | 1301 |
| 1410486 | 202871 | 202886 | N/A | N/A | TAGTATTATGCAGCAT | 50 | U | 1302 |
| 1410509 | 303472 | 303487 | N/A | N/A | CATTATCTATGTCAGC | 7 | U | 1303 |
| 1410545 | 236800 | 236815 | N/A | N/A | TGTTATACTGATGGGC | 7 | U | 1304 |
| 1410547 | 430301 | 430316 | N/A | N/A | AGCTTTAAAGAGCCAC | 94 | U | 1305 |
| 1410560 | 228137 | 228152 | N/A | N/A | AGCAATCAGAAGTTCC | 9 | U | 1306 |
| 1411095 | 217867 | 217882 | 833 | 848 | GACAAGATGGCTCCTG | 6 | U | 1307 |
| 1411122 | 560886 | 560901 | 9875 | 9890 | TTGGAAAATGATGCAC | 26 | U | 1308 |
| 1411138 | 554300 | 554315 | 3289 | 3304 | GATCTTGAAAAACCCT | 40 | U | 1309 |
| 1411160 | 217417 | 217432 | 383 | 398 | CAGTAAGAGGCTGGAC | 86 | u | 1310 |
| 1411270 | 559569 | 559584 | 8558 | 8573 | ATACTTTAGTGCTTGT | 15 | u | 1311 |
| 1411273 | 556098 | 556113 | 5087 | 5102 | CTTTACCCAAACAAGG | 80 | u | 1312 |
| 1411294 | 560235 | 560250 | 9224 | 9239 | TTCAAATGGTTAAGGC | 18 | u | 1313 |
| 1411327 | 222093 | 222108 | 1503 | 1518 | AAATAGCTATCAGGCT | 37 | u | 1314 |
| 1411341 | 557567 | 557582 | 6556 | 6571 | AGATTAGGATAACAGT | 14 | u | 1315 |
| 1411382 | 555159 | 555174 | 4148 | 4163 | ACACATATGTAGAGTA | 91 | u | 1316 |
| 1411389 | 558913 | 558928 | 7902 | 7917 | CAACAATGGCAGGTGA | 65 | u | 1317 |
| 1411401 | 457280 | 457295 | 2405 | 2420 | GGTTAGTAGTACTTCC | 30 | u | 1318 |
| 1411412 | 559321 | 559336 | 8310 | 8325 | ACTAAGACTGCACAGG | 31 | u | 1319 |
| 1173403 | 288679 | 288694 | 2074 | 2089 | TCTATTGGAGAAGTGT | 5 | V | 181 |
| 1408246 | 243312 | 243327 | N/A | N/A | AATTAAAAGACGGCCT | 87 | V | 1320 |
| 1408250 | 249395 | 249410 | N/A | N/A | TATTATTAGTATGTCC | 15 | V | 1321 |
| 1408254 | 263012 | 263027 | N/A | N/A | CAAAGTGATATGAATG | 64 | V | 1322 |
| | 263053 | 263068 | | | | | | |
| 1408312 | 290676 | 290691 | 2155 | 2170 | GGTATTAAGAAGCATT | 8 | V | 1323 |
| 1408334 | 188555 | 188570 | N/A | N/A | TTATTGATAGGCGAGA | 17 | V | 1324 |
| 1408560 | 288710 | 288725 | 2105 | 2120 | AAGCAATGGTATCTGG | 13 | V | 1325 |
| 1408627 | 189708 | 189723 | N/A | N/A | CATGATTTTCTTATAG | 78 | V | 1326 |
| 1408706 | 217873 | 217888 | 839 | 854 | CCAAAGGACAAGATGG | 68 | V | 1327 |
| 1408750 | 218202 | 218217 | 1168 | 1183 | AACATTCTCAGTTAAA | 29 | V | 1328 |
| 1409113 | 290003 | 290018 | N/A | N/A | CTTTAGTATAGTAGGT | 13 | V | 1329 |
| 1409157 | 283535 | 283550 | N/A | N/A | ACTAATGAGGATACAT | 56 | V | 1330 |
| 1409158 | 286178 | 286193 | N/A | N/A | GAGTATGGAGCTTCAG | 22 | V | 1331 |
| 1409237 | 222653 | 222668 | N/A | N/A | AAAGCTACGATCTCTC | 31 | V | 1332 |
| 1409276 | 205254 | 205269 | N/A | N/A | AATAGTTACAGCTGTG | 61 | V | 1333 |
| 1409299 | 231770 | 231785 | N/A | N/A | AAGAGTTAGGTTTACG | 6 | V | 1334 |
| 1409311 | 430475 | 430490 | N/A | N/A | GTAAATAACACTTCAT | 72 | V | 1335 |
| 1409317 | 544828 | 544843 | N/A | N/A | TGTATAAGTATTCAGC | 31 | V | 1336 |
| 1409328 | 556146 | 556161 | 5135 | 5150 | AACTATCCTGTTTGTT | 101 | V | 1337 |
| 1409369 | 314118 | 314133 | N/A | N/A | CTCATAATTTAGAGGT | 91 | V | 1338 |
| 1409394 | 60916 | 60931 | N/A | N/A | AGTAATATTGAGATCA | 11 | V | 1339 |
| | 394790 | 394805 | | | | | | |
| 1409399 | 35730 | 35745 | N/A | N/A | CATTTTGGACTGTACA | 116 | V | 1340 |
| 1409401 | 209688 | 209703 | N/A | N/A | AAATTCATTCACGCAT | 72 | V | 1341 |
| 1409424 | 190869 | 190884 | N/A | N/A | CTAGAACTGCTTCTTC | 80 | V | 1342 |
| 1409450 | 280528 | 280543 | N/A | N/A | TCATACTAAGATTGGC | 9 | V | 1343 |
| 1409454 | 513426 | 513441 | N/A | N/A | AGTAATTTAGCATTCC | 16 | V | 1344 |
| 1409487 | 498113 | 498128 | N/A | N/A | AAGGATTATGGGCTCC | 87 | V | 1345 |
| 1409493 | 330938 | 330953 | N/A | N/A | GATTTACATCCTTTCA | 59 | V | 1346 |
| 1409518 | 263470 | 263485 | N/A | N/A | GATGTAAATAAGATTA | 84 | V | 1347 |
| 1409559 | 84602 | 84617 | N/A | N/A | GCAAAATCCAGACTCA | 35 | V | 1348 |
| 1409590 | 207002 | 207017 | N/A | N/A | CTCTATTTGAAAGTGC | 51 | V | 1349 |
| 1409623 | 221508 | 221523 | N/A | N/A | AAACTTTCATCAGTTG | 93 | V | 1350 |
| 1409642 | 262581 | 262596 | N/A | N/A | AGACTACAGGGTGCGA | 73 | V | 1351 |
| 1409657 | 257800 | 257815 | N/A | N/A | GCTGTAAAAGCCCAGT | 81 | V | 1352 |
| 1409693 | 150328 | 150343 | N/A | N/A | GCCAATCAAATTGGTT | 95 | V | 1353 |
| 1409696 | 74362 | 74377 | N/A | N/A | ATCATATAGGAGGCAG | 106 | V | 1354 |
| 1409704 | 236846 | 236861 | N/A | N/A | CTTATTAAAGTTATGA | 78 | V | 1355 |
| 1409722 | 293715 | 293730 | N/A | N/A | CATCATAGCACCTCAG | 33 | V | 1356 |
| 1409725 | 183378 | 183393 | N/A | N/A | TAAACTTCATACCTTC | 45 | V | 1357 |
| 1409776 | 212638 | 212653 | N/A | N/A | GTGAAGTAGAAATCCA | 54 | V | 1358 |
| 1409780 | 370459 | 370474 | N/A | N/A | GATACTATAGAATCTC | 37 | V | 1359 |
| 1409832 | 352780 | 352795 | N/A | N/A | AACATATAGCCACAGC | 21 | V | 1360 |
| 1409862 | 481174 | 481189 | N/A | N/A | GTTTATATTTGCATGC | 68 | V | 1361 |
| 1409904 | 135028 | 135043 | N/A | N/A | GATAACATCAAGGTGC | 65 | V | 1362 |
| 1409905 | 408851 | 408866 | N/A | N/A | AACATTAAATCCCAGG | 36 | V | 1363 |
| 1409920 | 167875 | 167890 | N/A | N/A | GTTTATTCAAGGATCC | 43 | V | 1364 |
| 1409986 | 245516 | 245531 | N/A | N/A | ACTTTATCTTGACTAA | 47 | V | 1365 |
| 1410009 | 304705 | 304720 | N/A | N/A | CTTACCTAGACCTTCT | 40 | V | 1366 |
| 1410036 | 463327 | 463342 | N/A | N/A | GTTTATAGTGACCATC | 3 | V | 1367 |
| 1410067 | 234706 | 234721 | N/A | N/A | ACTTACCATGCAGTAA | 72 | V | 1368 |
| 1410074 | 276133 | 276148 | N/A | N/A | CATGTAAGATGTCTGG | 52 | V | 1369 |
| 1410084 | 443331 | 443346 | N/A | N/A | ACAACTAAATCAGTCT | 71 | V | 1370 |
| 1410159 | 271616 | 271631 | N/A | N/A | AGCTATACATGATCTT | 53 | V | 1371 |
| 1410221 | 291272 | 291287 | N/A | N/A | GTATTATGAAGAGTTC | 28 | V | 1372 |
| 1410237 | 268890 | 268905 | N/A | N/A | TCATTTATAGGTCATG | 16 | V | 1373 |
| 1410253 | 203374 | 203389 | N/A | N/A | ATTACTGTAGCTCCAG | 27 | V | 1374 |
| 1410265 | 103316 | 103331 | N/A | N/A | AAGAGTTAGACACTTC | 59 | V | 1375 |
| 1410271 | 199322 | 199337 | N/A | N/A | ATTACAAGTCACCTGC | 71 | V | 1376 |
| 1410272 | 195451 | 195466 | N/A | N/A | CAACTATGTCAATCAG | 64 | V | 1377 |
| 1410315 | 225422 | 225437 | N/A | N/A | GGAGAATTCATTAGTC | 14 | V | 1378 |
| 1410329 | 530683 | 530698 | N/A | N/A | GCTAATTTCATAGGTA | 35 | V | 1379 |
| 1410330 | 253907 | 253922 | N/A | N/A | AGGTAGAGCTGACCAA | 79 | V | 1380 |
| 1410364 | 114648 | 114663 | N/A | N/A | AATATGTACCATAGGC | 27 | V | 1381 |
| 1410453 | 228144 | 228159 | N/A | N/A | ACCAATAAGCAATCAG | 17 | V | 1382 |
| 1410498 | 181220 | 181235 | N/A | N/A | CCTTATAAGCAATGAC | 38 | V | 1383 |
| 1411091 | 457301 | 457316 | 2426 | 2441 | CATGAGGAATGTCCAA | 27 | V | 1384 |
| 1411107 | 555418 | 555433 | 4407 | 4422 | AACAAAGTCACTTTGC | 57 | V | 1385 |
| 1411144 | 560921 | 560936 | 9910 | 9925 | AAGGAATGATCTGCAG | 53 | V | 1386 |
| 1411151 | 217418 | 217433 | 384 | 399 | CCAGTAAGAGGCTGGA | 94 | V | 1387 |
| 1411171 | 562292 | 562307 | 11281 | 11296 | ACACAAATTACTGTTC | 80 | V | 1388 |
| 1411176 | 222094 | 222109 | 1504 | 1519 | AAAATAGCTATCAGGC | 17 | V | 1389 |
| 1411187 | 556860 | 556875 | 5849 | 5864 | GAAAATGTGGTTGGCT | 20 | V | 1390 |
| 1411201 | 557569 | 557584 | 6558 | 6573 | CTAGATTAGGATAACA | 36 | V | 1391 |
| 1411213 | 554315 | 554330 | 3304 | 3319 | ACGGATTACCAGAAAG | 14 | V | 1392 |
| 1411241 | 559322 | 559337 | 8311 | 8326 | TACTAAGACTGCACAG | 60 | V | 1393 |
| 1411268 | 558915 | 558930 | 7904 | 7919 | TACAACAATGGCAGGT | 26 | V | 1394 |
| 1411344 | 560270 | 560285 | 9259 | 9274 | TAAACTCCATGGCTTT | 57 | V | 1395 |
| 1411360 | 559570 | 559585 | 8559 | 8574 | TATACTTTAGTGCTTG | 15 | V | 1396 |
| 1173403 | 288679 | 288694 | 2074 | 2089 | TCTATTGGAGAAGTGT | 6 | W | 181 |
| 1408245 | 243313 | 243328 | N/A | N/A | AAATTAAAAGACGGCC | 98 | W | 1397 |
| 1408249 | 249396 | 249411 | N/A | N/A | GTATTATTAGTATGTC | 18 | W | 1398 |
| 1408311 | 290678 | 290693 | 2157 | 2172 | TCGGTATTAAGAAGCA | 31 | W | 1399 |
| 1408333 | 188556 | 188571 | N/A | N/A | ATTATTGATAGGCGAG | 20 | W | 1400 |
| 1408559 | 288730 | 288745 | N/A | N/A | TTGTATCAGATTACCT | 76 | W | 1401 |
| 1408626 | 189718 | 189733 | N/A | N/A | AGTCTATAGGCATGAT | 25 | W | 1402 |
| 1408682 | 217923 | 217938 | 889 | 904 | ACCAACACTGCCTGCA | 13 | W | 1403 |
| 1408718 | 263069 | 263084 | N/A | N/A | TATTATCAGCTCACAC | 33 | W | 1404 |
| 1408727 | 262869 | 262884 | N/A | N/A | ACCATATGAATAAAGA | 53 | W | 1405 |
| 1408744 | 218212 | 218227 | 1178 | 1193 | ATTCATCCCAAACATT | 16 | W | 1406 |
| 1409117 | 513624 | 513639 | N/A | N/A | ACTTTATTAAGCCTCC | 26 | W | 1407 |
| 1409185 | 103463 | 103478 | N/A | N/A | GTCCATAAGCTCTTTC | 23 | W | 1408 |
| 1409210 | 481482 | 481497 | N/A | N/A | GATATTGGAGCCATCA | 86 | W | 1409 |
| 1409211 | 443878 | 443893 | N/A | N/A | TAGTATTTCAAGAGGC | 11 | W | 1410 |
| 1409249 | 150517 | 150532 | N/A | N/A | GTTACTAGACTCACCA | 67 | W | 1411 |
| 1409257 | 269652 | 269667 | N/A | N/A | GTATCTTAGATTCAAA | 48 | W | 1412 |
| 1409282 | 85745 | 85760 | N/A | N/A | GTATACATAAGAGTCT | 44 | W | 1413 |
| 1409300 | 276351 | 276366 | N/A | N/A | AATTTAGAAGATGCCA | 43 | W | 1414 |
| 1409371 | 205261 | 205276 | N/A | N/A | AGTGATTAATAGTTAC | 77 | W | 1415 |
| 1409378 | 499022 | 499037 | N/A | N/A | TAGATTTAAACAGTCT | 113 | W | 1416 |
| 1409400 | 544829 | 544844 | N/A | N/A | CTGTATAAGTATTCAG | 104 | W | 1417 |
| 1409412 | 287010 | 287025 | N/A | N/A | CCAAAGTATCACCTTA | 11 | W | 1418 |
| 1409426 | 284070 | 284085 | N/A | N/A | GCCAATAACCATAGTT | 47 | W | 1419 |
| 1409440 | 305987 | 306002 | N/A | N/A | GAGTATATTGTATGAC | 13 | W | 1420 |
| 1409455 | 293802 | 293817 | N/A | N/A | TATACTTCAGATTGTT | 20 | W | 1421 |
| 1409465 | 463610 | 463625 | N/A | N/A | TGTAATATTTGTCATC | 8 | W | 1422 |
| 1409500 | 409387 | 409402 | N/A | N/A | CCATATTATGTGCTTC | 6 | W | 1423 |
| 1409538 | 432248 | 432263 | N/A | N/A | CCATTTTGAACCCACA | 95 | W | 1424 |
| 1409558 | 183380 | 183395 | N/A | N/A | GCTAAACTTCATACCT | 38 | W | 1425 |
| 1409600 | 191393 | 191408 | N/A | N/A | GCCTACTATTGACTAG | 90 | W | 1426 |
| 1409626 | 38260 | 38275 | N/A | N/A | CCTACTAGACTGCTGG | 97 | W | 1427 |
| 1409659 | 119331 | 119346 | N/A | N/A | ATCAGTTAAAGATGAG | 70 | W | 1428 |
| 1409728 | 330969 | 330984 | N/A | N/A | AGCTTATAAATCCTGC | 40 | W | 1429 |
| 1409748 | 135500 | 135515 | N/A | N/A | CTCATAAAGATGACCA | 53 | W | 1430 |
| 1409774 | 77774 | 77789 | N/A | N/A | GACAAATCACTTGTGG | 28 | W | 1431 |
| 1409791 | 228196 | 228211 | N/A | N/A | GCAAAGTCTTACCACA | 12 | W | 1432 |
| 1409835 | 237086 | 237101 | N/A | N/A | CACTAGTTAATCCTCA | 38 | W | 1433 |
| 1409852 | 562304 | 562319 | 11293 | 11308 | TTAACAATATCCACAC | 28 | W | 1434 |
| 1409856 | 199339 | 199354 | N/A | N/A | CATGTAATAAAGAGGT | 72 | W | 1435 |
| 1409889 | 396085 | 396100 | N/A | N/A | ACTTATATTAGATGGT | 89 | W | 1436 |
| 1409915 | 257810 | 257825 | N/A | N/A | CATTTTAGATGCTGTA | 26 | W | 1437 |
| 1409973 | 222859 | 222874 | N/A | N/A | AAGATATCAGCTCTCT | 66 | W | 1438 |
| 1409987 | 212708 | 212723 | N/A | N/A | TAAGAGTTTTGCAGTA | 25 | W | 1439 |
| 1410016 | 254579 | 254594 | N/A | N/A | TTAACTTAGTCTTCCA | 8 | W | 1440 |
| 1410023 | 203375 | 203390 | N/A | N/A | GATTACTGTAGCTCCA | 22 | W | 1441 |
| 1410080 | 280529 | 280544 | N/A | N/A | ATCATACTAAGATTGG | 27 | W | 1442 |
| 1410089 | 530706 | 530721 | N/A | N/A | TGTTATTATACTTGTA | 53 | W | 1443 |
| 1410121 | 221509 | 221524 | N/A | N/A | CAAACTTTCATCAGTT | 96 | W | 1444 |
| 1410135 | 209690 | 209705 | N/A | N/A | CAAAATTCATTCACGC | 51 | W | 1445 |
| 1410155 | 291273 | 291288 | N/A | N/A | AGTATTATGAAGAGTT | 9 | W | 1446 |
| 1410190 | 370615 | 370630 | N/A | N/A | TGTTTTAGAGAACTCC | 10 | W | 1447 |
| 1410203 | 225500 | 225515 | N/A | N/A | ACTAACACTTTATACA | 72 | W | 1448 |
| 1410212 | 353188 | 353203 | N/A | N/A | TCAGTAATTAGACTTA | 12 | W | 1449 |
| 1410242 | 231801 | 231816 | N/A | N/A | GATACAAATTTCTGGA | 9 | W | 1450 |
| 1410274 | 272321 | 272336 | N/A | N/A | TGTATACAAAGCTGAA | 45 | W | 1451 |
| 1410286 | 207434 | 207449 | N/A | N/A | TAAATTTCAGTGGAGA | 31 | W | 1452 |
| 1410309 | 245621 | 245636 | N/A | N/A | TATACCTTCCATCAGA | 96 | W | 1453 |
| 1410313 | 168919 | 168934 | N/A | N/A | GATATGAGAAACCTTC | 36 | W | 1454 |
| 1410339 | 290004 | 290019 | N/A | N/A | TCTTTAGTATAGTAGG | 9 | W | 1455 |
| 1410345 | 316313 | 316328 | N/A | N/A | GAGAAATCAGGAGTCC | 73 | W | 1456 |
| 1410383 | 196438 | 196453 | N/A | N/A | AAGTATCAAGTAAAGT | 92 | W | 1457 |
| 1410433 | 263486 | 263501 | N/A | N/A | ACCTTATATTCCCTGT | 26 | W | 1458 |
| 1410487 | 181221 | 181236 | N/A | N/A | TCCTTATAAGCAATGA | 35 | W | 1459 |
| 1410558 | 234711 | 234726 | N/A | N/A | ATTATACTTACCATGC | 46 | W | 1460 |
| 1410576 | 457311 | 457326 | 2436 | 2451 | GCATTTGGATCATGAG | 12 | W | 1461 |
| 1411127 | 217508 | 217523 | 474 | 489 | TGTAAACTTTGTTCCT | 6 | W | 1462 |
| 1411186 | 222095 | 222110 | 1505 | 1520 | TAAAATAGCTATCAGG | 21 | W | 1463 |
| 1411194 | 560272 | 560287 | 9261 | 9276 | TATAAACTCCATGGCT | 46 | W | 1464 |
| 1411217 | 557046 | 557061 | 6035 | 6050 | ATGGAAGGAAGTCCCA | 82 | W | 1465 |
| 1411238 | 555444 | 555459 | 4433 | 4448 | CTATCAAGGAGACTGA | 86 | W | 1466 |
| 1411259 | 556155 | 556170 | 5144 | 5159 | CATATTGGTAACTATC | 60 | W | 1467 |
| 1411285 | 561062 | 561077 | 10051 | 10066 | GCTGATGGAAAAGTGC | 91 | W | 1468 |
| 1411297 | 557923 | 557938 | 6912 | 6927 | ACAATGGAGAAACTTC | 47 | W | 1469 |
| 1411306 | 554326 | 554341 | 3315 | 3330 | TAAATATATTCACGGA | 13 | W | 1470 |
| 1411314 | 559571 | 559586 | 8560 | 8575 | ATATACTTTAGTGCTT | 21 | W | 1471 |
| 1411325 | 558916 | 558931 | 7905 | 7920 | ATACAACAATGGCAGG | 22 | W | 1472 |
| 1411409 | 559323 | 559338 | 8312 | 8327 | TTACTAAGACTGCACA | 70 | W | 1473 |
| 1173403 | 288679 | 288694 | 2074 | 2089 | TCTATTGGAGAAGTGT | 6 | X | 181 |
| 1408244 | 243315 | 243330 | N/A | N/A | AGAAATTAAAAGACGG | 18 | X | 1474 |
| 1408248 | 249397 | 249412 | N/A | N/A | GGTATTATTAGTATGT | 5 | X | 1475 |
| 1408310 | 290680 | 290695 | 2159 | 2174 | GATCGGTATTAAGAAG | 85 | X | 1476 |
| 1408332 | 188557 | 188572 | N/A | N/A | TATTATTGATAGGCGA | 32 | X | 1477 |
| 1408545 | 288739 | 288754 | N/A | N/A | TTCAAGGATTTGTATC | 78 | X | 1478 |
| 1408603 | 181222 | 181237 | N/A | N/A | CTCCTTATAAGCAATG | 44 | X | 1479 |
| 1408625 | 189728 | 189743 | N/A | N/A | ATCATTGTAGAGTCTA | 8 | X | 1480 |
| 1408701 | 263070 | 263085 | N/A | N/A | ATATTATCAGCTCACA | 16 | X | 1481 |
| 1408710 | 262900 | 262915 | N/A | N/A | ACCAAGCATGCATCCA | 18 | X | 1482 |
| 1408734 | 218232 | 218247 | 1198 | 1213 | CTCTGAAGGAGCTTTC | 18 | X | 1483 |
| 1409088 | 78118 | 78133 | N/A | N/A | CAGGATAAGAGTGCTG | 71 | X | 1484 |
| 1409114 | 293998 | 294013 | N/A | N/A | TAGATAAAGAGGCATT | 12 | X | 1485 |
| 1409119 | 263943 | 263958 | N/A | N/A | TATCATCCAAAGCCCA | 59 | X | 1486 |
| 1409137 | 207435 | 207450 | N/A | N/A | GTAAATTTCAGTGGAG | 25 | X | 1487 |
| 1409151 | 221510 | 221525 | N/A | N/A | CCAAACTTTCATCAGT | 57 | X | 1488 |
| 1409171 | 196474 | 196489 | N/A | N/A | GTATAAGATTTTCTTC | 70 | X | 1489 |
| 1409173 | 432780 | 432795 | N/A | N/A | CCTTAACATTGTCTCA | 39 | X | 1490 |
| 1409187 | 191607 | 191622 | N/A | N/A | GTTTACTTAAAGTCTG | 19 | X | 1491 |
| 1409216 | 119463 | 119478 | N/A | N/A | CTTTATACAACTTCCC | 27 | X | 1492 |
| 1409238 | 228321 | 228336 | N/A | N/A | TCAAATCCTTGCATCT | 57 | X | 1493 |
| 1409251 | 209712 | 209727 | N/A | N/A | CCTATTAAATGCCCAT | 61 | X | 1494 |
| 1409260 | 269655 | 269670 | N/A | N/A | ATAGTATCTTAGATTC | 21 | X | 1495 |
| 1409278 | 183596 | 183611 | N/A | N/A | CAAATTAGAAGGTGTC | 9 | X | 1496 |
| 1409283 | 169269 | 169284 | N/A | N/A | GTAGAATAGTTCTTCC | 28 | X | 1497 |
| 1409307 | 152301 | 152316 | N/A | N/A | GATAATCACAGGTTGT | 48 | X | 1498 |
| 1409375 | 254580 | 254595 | N/A | N/A | TTTAACTTAGTCTTCC | 10 | X | 1499 |
| 1409473 | 354265 | 354280 | N/A | N/A | ACAAATTTATGAGGCT | 6 | X | 1500 |
| 1409481 | 444567 | 444582 | N/A | N/A | TTCAAGTTAATGGTCA | 6 | X | 1501 |
| 1409494 | 237721 | 237736 | N/A | N/A | GAAACTCAGACCAGGC | 12 | X | 1502 |
| 1409498 | 411528 | 411543 | N/A | N/A | CCAACTAACTTCCAGC | 82 | X | 1503 |
| 1409529 | 272322 | 272337 | N/A | N/A | CTGTATACAAAGCTGA | 18 | X | 1504 |
| 1409587 | 199504 | 199519 | N/A | N/A | TCAATAATGATAGTCA | 47 | X | 1505 |
| 1409698 | 135526 | 135541 | N/A | N/A | CTTGAATCAAATCTGG | 61 | X | 1506 |
| 1409731 | 500464 | 500479 | N/A | N/A | TTAGATATGGTCCTTC | 51 | X | 1507 |
| 1409766 | 284154 | 284169 | N/A | N/A | GCTCAAATGTAATCAT | 32 | X | 1508 |
| 1409839 | 234712 | 234727 | N/A | N/A | GATTATACTTACCATG | 64 | X | 1509 |
| 1409859 | 463909 | 463924 | N/A | N/A | TCAGATTTAATAGGTC | 4 | X | 1510 |
| 1409866 | 205405 | 205420 | N/A | N/A | ATGCTAAAGGCACAGA | 64 | X | 1511 |
| 1409900 | 530803 | 530818 | N/A | N/A | TCTTTAAGATGACTGT | 50 | X | 1512 |
| 1409909 | 396086 | 396101 | N/A | N/A | GACTTATATTAGATGG | 9 | X | 1513 |
| 1409949 | 483370 | 483385 | N/A | N/A | AAGAATTCATTTGGAG | 69 | X | 1514 |
| 1409960 | 316619 | 316634 | N/A | N/A | ACACTATTTTGACTAC | 61 | X | 1515 |
| 1410003 | 43215 | 43230 | N/A | N/A | GAAATACTGTCGACAC | 76 | X | 1516 |
| 1410160 | 246181 | 246196 | N/A | N/A | CACTTACTGGTTCCAG | 11 | X | 1517 |
| 1410164 | 290005 | 290020 | N/A | N/A | TTCTTTAGTATAGTAG | 19 | X | 1518 |
| 1410169 | 291274 | 291289 | N/A | N/A | GAGTATTATGAAGAGT | 3 | X | 1519 |
| 1410195 | 103730 | 103745 | N/A | N/A | AGTTATCAAGTTTTCA | 9 | X | 1520 |
| 1410232 | 223036 | 223051 | N/A | N/A | GTAGATAACCTGAGGA | 40 | X | 1521 |
| 1410238 | 559572 | 559587 | 8561 | 8576 | GATATACTTTAGTGCT | 18 | X | 1522 |
| 1410288 | 280537 | 280552 | N/A | N/A | CCTTTTGAATCATACT | 39 | X | 1523 |
| 1410405 | 231802 | 231817 | N/A | N/A | TGATACAAATTTCTGG | 8 | X | 1524 |
| 1410412 | 276879 | 276894 | N/A | N/A | GCTATTTAGAAGGTAA | 67 | X | 1525 |
| 1410424 | 85904 | 85919 | N/A | N/A | ACTATTTAGATCATGA | 20 | X | 1526 |
| 1410426 | 225646 | 225661 | N/A | N/A | ACTAATAGTTCCTTTC | 58 | X | 1527 |
| 1410430 | 372336 | 372351 | N/A | N/A | CCACAATACTGGCTTT | 46 | X | 1528 |
| 1410431 | 287022 | 287037 | N/A | N/A | GAAGAGTTAATTCCAA | 15 | X | 1529 |
| 1410438 | 212984 | 212999 | N/A | N/A | GCTGAATTATTTGTCT | 49 | X | 1530 |
| 1410451 | 306173 | 306188 | N/A | N/A | GAAGTAGAGATGGCAT | 30 | X | 1531 |
| 1410493 | 546153 | 546168 | N/A | N/A | TATTTACATGGATCTC | 21 | X | 1532 |
| 1410533 | 331862 | 331877 | N/A | N/A | ATAGTATGATAGCACA | 5 | X | 1533 |
| 1410557 | 257829 | 257844 | N/A | N/A | ACTTTATGAGCCAGCC | 21 | X | 1534 |
| 1410567 | 203476 | 203491 | N/A | N/A | TCAATAATACAGACGG | 18 | X | 1535 |
| 1411098 | 457336 | 457351 | 2461 | 2476 | CAAGAATCCACTTTTG | 80† | X | 1536 |
| 1411117 | 217509 | 217524 | 475 | 490 | CTGTAAACTTTGTTCC | 10 | X | 1537 |
| 1411153 | 557048 | 557063 | 6037 | 6052 | ATATGGAAGGAAGTCC | 62 | X | 1538 |
| 1411172 | 514823 | 514838 | 2692 | 2707 | TTTAAGTTTAAACACG | 38 | X | 1539 |
| 1411218 | 558917 | 558932 | 7906 | 7921 | AATACAACAATGGCAG | 24 | X | 1540 |
| 1411266 | 554327 | 554342 | 3316 | 3331 | TTAAATATATTCACGG | 17 | X | 1541 |
| 1411275 | 560274 | 560289 | 9263 | 9278 | TTTATAAACTCCATGG | 69 | X | 1542 |
| 1411280 | 222096 | 222111 | 1506 | 1521 | CTAAAATAGCTATCAG | 27 | X | 1543 |
| 1411282 | 557924 | 557939 | 6913 | 6928 | GACAATGGAGAAACTT | 35 | X | 1544 |
| 1411339 | 555466 | 555481 | 4455 | 4470 | GAGTAGTAGCAGAGTG | 38 | X | 1545 |
| 1411340 | 562306 | 562321 | 11295 | 11310 | CTTTAACAATATCCAC | 27 | X | 1546 |
| 1411375 | 556156 | 556171 | 5145 | 5160 | CCATATTGGTAACTAT | 44 | X | 1547 |
| 1411379 | 217926 | 217941 | 892 | 907 | GAAACCAACACTGCCT | 9 | X | 1548 |
| 1411440 | 561174 | 561189 | 10163 | 10178 | GAAGTTAGGGTGCTTA | 35 | X | 1549 |
| 1411444 | 559325 | 559340 | 8314 | 8329 | AGTTACTAAGACTGCA | 59 | X | 1550 |
| 1173403 | 288679 | 288694 | 2074 | 2089 | TCTATTGGAGAAGTGT | 6 | Y | 181 |
| 1408315 | 290682 | 290697 | 2161 | 2176 | TAGATCGGTATTAAGA | 50 | Y | 1551 |
| 1408331 | 188559 | 188574 | N/A | N/A | GGTATTATTGATAGGC | 6 | Y | 1552 |
| 1408558 | 288740 | 288755 | N/A | N/A | ATTCAAGGATTTGTAT | 91 | Y | 1553 |
| 1408624 | 189748 | 189763 | N/A | N/A | CTAACCTCATTTTTTC | 75 | Y | 1554 |
| 1408672 | 243354 | 243369 | N/A | N/A | TTTCAAACATCTTGTG | 62 | Y | 1555 |
| 1408717 | 263079 | 263094 | N/A | N/A | GGTATGATAATATTAT | 94 | Y | 1556 |
| 1408726 | 262909 | 262924 | N/A | N/A | ATATCAGTTACCAAGC | 41 | Y | 1557 |
| 1408870 | 217932 | 217947 | 898 | 913 | TTTCAAGAAACCAACA | 49 | Y | 1558 |
| 1409095 | 85906 | 85921 | N/A | N/A | ACACTATTTAGATCAT | 49 | Y | 1559 |
| 1409120 | 432941 | 432956 | N/A | N/A | AGAACTTGAAGGCTTA | 32 | Y | 1560 |
| 1409140 | 306432 | 306447 | N/A | N/A | CAGCAATTTAGAGCAA | 50 | Y | 1561 |
| 1409147 | 291275 | 291290 | N/A | N/A | AGAGTATTATGAAGAG | 3 | Y | 1562 |
| 1409193 | 205409 | 205424 | N/A | N/A | GATAATGCTAAAGGCA | 71 | Y | 1563 |
| 1409204 | 103797 | 103812 | N/A | N/A | TTAACAGTAGAGGTCC | 24 | Y | 1564 |
| 1409207 | 246258 | 246273 | N/A | N/A | ATGGTAAAATAGAGGT | 4 | Y | 1565 |
| 1409226 | 276881 | 276896 | N/A | N/A | AAGCTATTTAGAAGGT | 76 | Y | 1566 |
| 1409266 | 269658 | 269673 | N/A | N/A | TCAATAGTATCTTAGA | 38 | Y | 1567 |
| 1409320 | 152395 | 152410 | N/A | N/A | TTCTTAAAAGAGCTCC | 80 | Y | 1568 |
| 1409351 | 223910 | 223925 | N/A | N/A | CAAACCATGTTTGGTC | 54 | Y | 1569 |
| 1409391 | 254605 | 254620 | N/A | N/A | TTATTAAGTCAGGTCA | 4 | Y | 1570 |
| 1409408 | 293999 | 294014 | N/A | N/A | GTAGATAAAGAGGCAT | 4 | Y | 1571 |
| 1409475 | 290310 | 290325 | N/A | N/A | TATACATAGTACAAGG | 23 | Y | 1572 |
| 1409484 | 213007 | 213022 | N/A | N/A | TTTAGAGACATGCCCA | 40 | Y | 1573 |
| 1409562 | 447159 | 447174 | N/A | N/A | AACAATGTATTGTCAT | 48 | Y | 1574 |
| 1409585 | 203697 | 203712 | N/A | N/A | GAAATCAACATTCCAG | 35 | Y | 1575 |
| 1409595 | 225648 | 225663 | N/A | N/A | ACACTAATAGTTCCTT | 19 | Y | 1576 |
| 1409603 | 181236 | 181251 | N/A | N/A | TGTAAGTTCATTATCT | 41 | Y | 1577 |
| 1409638 | 231815 | 231830 | N/A | N/A | ACAATAGAGCAAGTGA | 13 | Y | 1578 |
| 1409655 | 207436 | 207451 | N/A | N/A | GGTAAATTTCAGTGGA | 16 | Y | 1579 |
| 1409660 | 396498 | 396513 | N/A | N/A | GATTTTAGGCTACTCA | 30 | Y | 1580 |
| 1409669 | 196476 | 196491 | N/A | N/A | CAGTATAAGATTTTCT | 72 | Y | 1581 |
| 1409700 | 119464 | 119479 | N/A | N/A | CCTTTATACAACTTCC | 18 | Y | 1582 |
| 1409747 | 272329 | 272344 | N/A | N/A | CATGAATCTGTATACA | 69 | Y | 1583 |
| 1409751 | 354971 | 354986 | N/A | N/A | AGAGTAATATTGGCAC | 6 | Y | 1584 |
| 1409773 | 264213 | 264228 | N/A | N/A | GCATTAGCAAAATCAG | 26 | Y | 1585 |
| 1409779 | 199598 | 199613 | N/A | N/A | GCTTAATCTAGAGAGA | 57 | Y | 1586 |
| 1409817 | 183645 | 183660 | N/A | N/A | AAATTTCAATGCACTA | 43 | Y | 1587 |
| 1409825 | 486662 | 486677 | N/A | N/A | TCTATAACATGCTACT | 55 | Y | 1588 |
| 1409860 | 546172 | 546187 | N/A | N/A | TTAATCATATCCACAC | 34 | Y | 1589 |
| 1409881 | 78244 | 78259 | N/A | N/A | GCAAATCAAGCTTCTT | 9 | Y | 1590 |
| 1409906 | 249398 | 249413 | N/A | N/A | AGGTATTATTAGTATG | 7 | Y | 1591 |
| 1409908 | 530804 | 530819 | N/A | N/A | ATCTTTAAGATGACTG | 57 | Y | 1592 |
| 1409955 | 501256 | 501271 | N/A | N/A | TTTACAAAGTTGTTCC | 25 | Y | 1593 |
| 1409962 | 221511 | 221526 | N/A | N/A | ACCAAACTTTCATCAG | 58 | Y | 1594 |
| 1410014 | 228974 | 228989 | N/A | N/A | AAGGTTTAAACCACAG | 17 | Y | 1595 |
| 1410062 | 169811 | 169826 | N/A | N/A | CGCTTTAAAACAGCAA | 84 | Y | 1596 |
| 1410066 | 373262 | 373277 | N/A | N/A | GTTCTATAAACTGTTC | 8 | Y | 1597 |
| 1410090 | 136556 | 136571 | N/A | N/A | GAAACAATCTGTCCAT | 81 | Y | 1598 |
| 1410124 | 287024 | 287039 | N/A | N/A | CTGAAGAGTTAATTCC | 15 | Y | 1599 |
| 1410141 | 257831 | 257846 | N/A | N/A | ATACTTTATGAGCCAG | 3 | Y | 1600 |
| 1410165 | 281682 | 281697 | N/A | N/A | AGGGAAAATTCATGGC | 29 | Y | 1601 |
| 1410185 | 209713 | 209728 | N/A | N/A | TCCTATTAAATGCCCA | 40 | Y | 1602 |
| 1410200 | 284281 | 284296 | N/A | N/A | TCATTATATAACCTTA | 50 | Y | 1603 |
| 1410222 | 237984 | 237999 | N/A | N/A | GTAAACTAATCACACA | 86 | Y | 1604 |
| 1410261 | 411529 | 411544 | N/A | N/A | ACCAACTAACTTCCAG | 55 | Y | 1605 |
| 1410302 | 515145 | 515160 | N/A | N/A | TCTACTAAAACCCTCA | 66 | Y | 1606 |
| 1410359 | 331863 | 331878 | N/A | N/A | TATAGTATGATAGCAC | 11 | Y | 1607 |
| 1410386 | 43294 | 43309 | N/A | N/A | ACCAAATAAAGCTCCA | 93 | Y | 1608 |
| 1410388 | 191757 | 191772 | N/A | N/A | GTTTAAGTGCAATTTA | 54 | Y | 1609 |
| 1410483 | 317865 | 317880 | N/A | N/A | ATAAATCTGTGGATGA | 49 | Y | 1610 |
| 1410541 | 464142 | 464157 | N/A | N/A | TAGGATAAAGCTCTAA | 86 | Y | 1611 |
| 1410556 | 234740 | 234755 | N/A | N/A | TCAAGAATGTTCTGGT | 6 | Y | 1612 |
| 1411089 | 457338 | 457353 | 2463 | 2478 | GCCAAGAATCCACTTT | 20† | Y | 1613 |
| 1411124 | 559327 | 559342 | 8316 | 8331 | AAAGTTACTAAGACTG | 102 | Y | 1614 |
| 1411168 | 555472 | 555487 | 4461 | 4476 | AAAGTTGAGTAGTAGC | 58 | Y | 1615 |
| 1411195 | 218277 | 218292 | 1243 | 1258 | ATCAAGACGCACAGGG | 8 | Y | 1616 |
| 1411200 | 557049 | 557064 | 6038 | 6053 | CATATGGAAGGAAGTC | 57 | Y | 1617 |
| 1411204 | 561181 | 561196 | 10170 | 10185 | AGGAATTGAAGTTAGG | 9 | Y | 1618 |
| 1411212 | 559573 | 559588 | 8562 | 8577 | TGATATACTTTAGTGC | 59 | Y | 1619 |
| 1411231 | 217519 | 217534 | 485 | 500 | AGTCAATGGGCTGTAA | 15 | Y | 1620 |
| 1411239 | 558919 | 558934 | 7908 | 7923 | CAAATACAACAATGGC | 38 | Y | 1621 |
| 1411242 | 562308 | 562323 | 11297 | 11312 | CACTTTAACAATATCC | 13 | Y | 1622 |
| 1411255 | 557929 | 557944 | 6918 | 6933 | AGTAAGACAATGGAGA | 32 | Y | 1623 |
| 1411258 | 222097 | 222112 | 1507 | 1522 | GCTAAAATAGCTATCA | 39 | Y | 1624 |
| 1411260 | 556166 | 556181 | 5155 | 5170 | GATACATGGGCCATAT | 23 | Y | 1625 |
| 1411303 | 560275 | 560290 | 9264 | 9279 | CTTTATAAACTCCATG | 27 | Y | 1626 |
| 1411331 | 554407 | 554422 | 3396 | 3411 | AGACAATCTGTACAGA | 34 | Y | 1627 |
| 1173403 | 288679 | 288694 | 2074 | 2089 | TCTATTGGAGAAGTGT | 6 | z | 181 |
| 1408327 | 181270 | 181285 | N/A | N/A | ATTTAATGGTTCCTCG | 18 | z | 1628 |
| 1408330 | 188560 | 188575 | N/A | N/A | GGGTATTATTGATAGG | 27 | z | 1629 |
| 1408573 | 290687 | 290702 | 2166 | 2181 | CCATGTAGATCGGTAT | 6 | z | 1630 |
| 1408623 | 189788 | 189803 | N/A | N/A | TTAGATCTAACACCTT | 67 | Z | 1631 |
| 1408650 | 225812 | 225827 | N/A | N/A | AAATCATTACCACTTG | 26 | Z | 1632 |
| 1408671 | 243364 | 243379 | N/A | N/A | AACAATCAACTTTCAA | 26 | Z | 1633 |
| 1408675 | 217933 | 217948 | 899 | 914 | CTTTCAAGAAACCAAC | 75 | Z | 1634 |
| 1408685 | 249404 | 249419 | N/A | N/A | CGAAGTAGGTATTATT | 12 | Z | 1635 |
| 1408700 | 263080 | 263095 | N/A | N/A | TGGTATGATAATATTA | 98 | Z | 1636 |
| 1408709 | 262910 | 262925 | N/A | N/A | GATATCAGTTACCAAG | 67 | z | 1637 |
| 1409131 | 191807 | 191822 | N/A | N/A | ATCTATCTGATGCTTA | 42 | z | 1638 |
| 1409168 | 288743 | 288758 | N/A | N/A | GAAATTCAAGGATTTG | 88 | z | 1639 |
| 1409175 | 120346 | 120361 | N/A | N/A | GTAAATTCAGTATTCA | 14 | z | 1640 |
| 1409217 | 238072 | 238087 | N/A | N/A | ACTAGATCAAAATTCA | 48 | z | 1641 |
| 1409233 | 229011 | 229026 | N/A | N/A | ACCAATATCCAGGGAA | 39 | z | 1642 |
| 1409292 | 318190 | 318205 | N/A | N/A | ACATTAGTATATTCAC | 54 | z | 1643 |
| 1409298 | 331865 | 331880 | N/A | N/A | ACTATAGTATGATAGC | 61 | z | 1644 |
| 1409467 | 213008 | 213023 | N/A | N/A | TTTTAGAGACATGCCC | 51 | z | 1645 |
| 1409491 | 205449 | 205464 | N/A | N/A | ACGGTATGTAATCCAG | 54 | z | 1646 |
| 1409514 | 232058 | 232073 | N/A | N/A | GCATATGAGGTATGGG | 21 | z | 1647 |
| 1409540 | 207437 | 207452 | N/A | N/A | TGGTAAATTTCAGTGG | 22 | z | 1648 |
| 1409546 | 254606 | 254621 | N/A | N/A | ATTATTAAGTCAGGTC | 5 | z | 1649 |
| 1409553 | 199810 | 199825 | N/A | N/A | TGGTAACAATAATTCC | 47 | z | 1650 |
| 1409570 | 531052 | 531067 | N/A | N/A | GATTTATCTACATGTA | 69 | z | 1651 |
| 1409572 | 272383 | 272398 | N/A | N/A | AGCTATCAACTTGAGT | 66 | Z | 1652 |
| 1409601 | 103914 | 103929 | N/A | N/A | GTAACAAAACCTCATT | 26 | Z | 1653 |
| 1409668 | 170914 | 170929 | N/A | N/A | AGAATATCTAGAGTGG | 5 | z | 1654 |
| 1409718 | 234755 | 234770 | N/A | N/A | ATGTAATATGCCCTTT | 28 | z | 1655 |
| 1409759 | 152934 | 152949 | N/A | N/A | AGAACTACAAAGGTGA | 71 | z | 1656 |
| 1409781 | 515904 | 515919 | N/A | N/A | ACTCATAAATGAATGG | 60 | z | 1657 |
| 1409789 | 411530 | 411545 | N/A | N/A | CACCAACTAACTTCCA | 54 | z | 1658 |
| 1409796 | 562338 | 562353 | 11327 | 11342 | GTAAACTTAATTGTCA | 18 | z | 1659 |
| 1409799 | 196477 | 196492 | N/A | N/A | TCAGTATAAGATTTTC | 11 | z | 1660 |
| 1409823 | 210696 | 210711 | N/A | N/A | TCAGATAAGAGGGAGA | 65 | z | 1661 |
| 1409828 | 447161 | 447176 | N/A | N/A | CAAACAATGTATTGTC | 11 | Z | 1662 |
| 1409918 | 264510 | 264525 | N/A | N/A | ACCGTAACTACCTTGT | 44 | z | 1663 |
| 1409958 | 373374 | 373389 | N/A | N/A | TTTGATAAGGAGTCTA | 31 | z | 1664 |
| 1409991 | 397727 | 397742 | N/A | N/A | AGACATTAATCAATCA | 17 | z | 1665 |
| 1409997 | 137149 | 137164 | N/A | N/A | CAAACAACTTATTGAG | 66 | z | 1666 |
| 1410081 | 291309 | 291324 | N/A | N/A | AATTACTTCATAGTCC | 15 | z | 1667 |
| 1410087 | 464562 | 464577 | N/A | N/A | GGTATAAGGCTACAGG | 4 | z | 1668 |
| 1410112 | 246404 | 246419 | N/A | N/A | TACAATTTCAGTCCTC | 14 | z | 1669 |
| 1410116 | 87056 | 87071 | N/A | N/A | ACTTTAAGAAGGGCAA | 6 | z | 1670 |
| 1410134 | 221538 | 221553 | N/A | N/A | GATACGGCAAAATTTC | 44 | z | 1671 |
| 1410139 | 294001 | 294016 | N/A | N/A | TTGTAGATAAAGAGGC | 5 | z | 1672 |
| 1410158 | 457759 | 457774 | N/A | N/A | GCAAATTCAACCTTTC | 18 | z | 1673 |
| 1410178 | 433324 | 433339 | N/A | N/A | GCATTACAAAGGTCCT | 28 | z | 1674 |
| 1410194 | 503309 | 503324 | N/A | N/A | ACCAATTTGATTCATT | 65 | z | 1675 |
| 1410201 | 306687 | 306702 | N/A | N/A | CCAATAGTAATGCCCT | 10 | z | 1676 |
| 1410206 | 355691 | 355706 | N/A | N/A | GTACTATAACTTTTCA | 18 | z | 1677 |
| 1410230 | 487349 | 487364 | N/A | N/A | AAGAGTAAGGTACTAT | 68 | z | 1678 |
| 1410241 | 269663 | 269678 | N/A | N/A | CCCAATCAATAGTATC | 20 | z | 1679 |
| 1410283 | 203698 | 203713 | N/A | N/A | TGAAATCAACATTCCA | 58 | z | 1680 |
| 1410293 | 183646 | 183661 | N/A | N/A | GAAATTTCAATGCACT | 35 | z | 1681 |
| 1410312 | 287446 | 287461 | N/A | N/A | TCAGAATGCAAGGCAA | 45 | z | 1682 |
| 1410408 | 45139 | 45154 | N/A | N/A | CTTAAGCATGTTCCAA | 90 | z | 1683 |
| 1410428 | 257849 | 257864 | N/A | N/A | ATTATAGGTGGAGTTC | 25 | z | 1684 |
| 1410464 | 223912 | 223927 | N/A | N/A | CCCAAACCATGTTTGG | 93 | z | 1685 |
| 1410471 | 290312 | 290327 | N/A | N/A | TCTATACATAGTACAA | 31 | z | 1686 |
| 1410499 | 79260 | 79275 | N/A | N/A | AAGATATGGGCACTCC | 12 | z | 1687 |
| 1410505 | 284300 | 284315 | N/A | N/A | AAACATGTGTTGACAC | 34 | z | 1688 |
| 1410530 | 281715 | 281730 | N/A | N/A | CTTAATTAAACCACTA | 73 | z | 1689 |
| 1410569 | 547512 | 547527 | N/A | N/A | ATTATATCTTCGCTTT | 29 | z | 1690 |
| 1410574 | 276953 | 276968 | N/A | N/A | AGAATAGTACAGTCAA | 89 | z | 1691 |
| 1411085 | 222098 | 222113 | 1508 | 1523 | AGCTAAAATAGCTATC | 91 | z | 1692 |
| 1411156 | 561201 | 561216 | 10190 | 10205 | CTCCATTAACCAACAT | 27 | z | 1693 |
| 1411162 | 557050 | 557065 | 6039 | 6054 | TCATATGGAAGGAAGT | 24 | z | 1694 |
| 1411163 | 554411 | 554426 | 3400 | 3415 | GCAAAGACAATCTGTA | 40 | z | 1695 |
| 1411185 | 555474 | 555489 | 4463 | 4478 | AGAAAGTTGAGTAGTA | 66 | z | 1696 |
| 1411248 | 558934 | 558949 | 7923 | 7938 | AACTATAAATACCCAC | 34 | Z | 1697 |
| 1411257 | 218278 | 218293 | 1244 | 1259 | CATCAAGACGCACAGG | 17 | Z | 1698 |
| 1411265 | 559646 | 559661 | 8635 | 8650 | TTTTACCTGTGACACT | 35 | z | 1699 |
| 1411302 | 217524 | 217539 | 490 | 505 | CAAAGAGTCAATGGGC | 8 | z | 1700 |
| 1411311 | 556241 | 556256 | 5230 | 5245 | AGATTATCAGGTAGAA | 63 | z | 1701 |
| 1411336 | 558045 | 558060 | 7034 | 7049 | TGCAAAGCTAAACTTC | 80 | z | 1702 |
| 1411369 | 559328 | 559343 | 8317 | 8332 | TAAAGTTACTAAGACT | 102 | z | 1703 |
| 1411443 | 560276 | 560291 | 9265 | 9280 | GCTTTATAAACTCCAT | 11 | z | 1704 |
| 1173403 | 288679 | 288694 | 2074 | 2089 | TCTATTGGAGAAGTGT | 5 | AA | 181 |
| 1408326 | 181271 | 181286 | N/A | N/A | TATTTAATGGTTCCTC | 9 | AA | 1705 |
| 1408329 | 188561 | 188576 | N/A | N/A | AGGGTATTATTGATAG | 41 | AA | 1706 |
| 1408544 | 288759 | 288774 | N/A | N/A | CCATTGATATAAAAAA | 95 | AA | 1707 |
| 1408571 | 290707 | 290722 | N/A | N/A | ACAAATCCACACTTAC | 83 | AA | 1708 |
| 1408649 | 225872 | 225887 | N/A | N/A | GCAAAGCAAATACATT | 25 | AA | 1709 |
| 1408670 | 243374 | 243389 | N/A | N/A | GACCAAAAGTAACAAT | 70 | AA | 1710 |
| 1408684 | 249414 | 249429 | N/A | N/A | AACAATCCTGCGAAGT | 28 | AA | 1711 |
| 1408716 | 263089 | 263104 | N/A | N/A | TGATATCAATGGTATG | 71 | AA | 1712 |
| 1408863 | 217952 | 217967 | 918 | 933 | CCAAGAGCAGACCTCT | 67 | AA | 1713 |
| 1409098 | 103971 | 103986 | N/A | N/A | TCACAAAATGTAGGGT | 18 | AA | 1714 |
| 1409123 | 200164 | 200179 | N/A | N/A | ACAAATGATTACTCAC | 43 | AA | 1715 |
| 1409153 | 319852 | 319867 | N/A | N/A | ACACTAACATCTGTCC | 58 | AA | 1716 |
| 1409156 | 306721 | 306736 | N/A | N/A | ACAATATTCACTTACA | 16 | AA | 1717 |
| 1409178 | 79261 | 79276 | N/A | N/A | CAAGATATGGGCACTC | 15 | AA | 1718 |
| 1409243 | 269838 | 269853 | N/A | N/A | AGTTAATTGCTGGCAT | 12 | AA | 1719 |
| 1409252 | 238679 | 238694 | N/A | N/A | CCATATTCAGCACCTT | 13 | AA | 1720 |
| 1409275 | 281759 | 281774 | N/A | N/A | TCCTATCATGTAGTAA | 44 | AA | 1721 |
| 1409296 | 120651 | 120666 | N/A | N/A | AAATTTCGATGCAACA | 58 | AA | 1722 |
| 1409305 | 232059 | 232074 | N/A | N/A | AGCATATGAGGTATGG | 7 | AA | 1723 |
| 1409333 | 433982 | 433997 | N/A | N/A | GAAAATATGGTCTTGT | 27 | AA | 1724 |
| 1409336 | 466181 | 466196 | N/A | N/A | CAGAAGTAACAACCAT | 8 | AA | 1725 |
| 1409342 | 411631 | 411646 | N/A | N/A | CCAATGTAAACAGTAA | 5 | AA | 1726 |
| 1409370 | 272384 | 272399 | N/A | N/A | CAGCTATCAACTTGAG | 35 | AA | 1727 |
| 1409395 | 47446 | 47461 | N/A | N/A | TCAATAAAGTTGACCA | 81 | AA | 1728 |
| 1409404 | 457966 | 457981 | N/A | N/A | AGATAATCATGCCTCA | 37 | AA | 1729 |
| 1409458 | 203699 | 203714 | N/A | N/A | CTGAAATCAACATTCC | 27 | AA | 1730 |
| 1409472 | 517135 | 517150 | N/A | N/A | AAGCTATGATCATCAC | 77 | AA | 1731 |
| 1409521 | 213009 | 213024 | N/A | N/A | TTTTTAGAGACATGCC | 33 | AA | 1732 |
| 1409532 | 218518 | 218533 | N/A | N/A | TTAGCTTAGAAGGACC | 44 | AA | 1733 |
| 1409539 | 234756 | 234771 | N/A | N/A | CATGTAATATGCCCTT | 23 | AA | 1734 |
| 1409584 | 224434 | 224449 | N/A | N/A | TTATCATATGCCAACC | 17 | AA | 1735 |
| 1409605 | 262911 | 262926 | N/A | N/A | TGATATCAGTTACCAA | 54 | AA | 1736 |
| 1409621 | 547514 | 547529 | N/A | N/A | GTATTATATCTTCGCT | 9 | AA | 1737 |
| 1409710 | 205450 | 205465 | N/A | N/A | TACGGTATGTAATCCA | 39 | AA | 1738 |
| 1409737 | 503588 | 503603 | N/A | N/A | CGAATTGAATTATTCT | 93 | AA | 1739 |
| 1409767 | 257852 | 257867 | N/A | N/A | TTTATTATAGGTGGAG | 5 | AA | 1740 |
| 1409793 | 447360 | 447375 | N/A | N/A | ATAATCACATTCCATC | 38 | AA | 1741 |
| 1409801 | 487414 | 487429 | N/A | N/A | GCTATAAAAGCACTGC | 65 | AA | 1742 |
| 1409834 | 87130 | 87145 | N/A | N/A | CCATAAAGCACACCTG | 53 | AA | 1743 |
| 1409854 | 373830 | 373845 | N/A | N/A | AGGTATTAAACAGTTG | 5 | AA | 1744 |
| 1409896 | 284302 | 284317 | N/A | N/A | CAAAACATGTGTTGAC | 28 | AA | 1745 |
| 1409939 | 532131 | 532146 | N/A | N/A | ATCAACTATGTTATGG | 56 | AA | 1746 |
| 1409981 | 189795 | 189810 | N/A | N/A | TCCAAGTTTAGATCTA | 16 | AA | 1747 |
| 1409998 | 153514 | 153529 | N/A | N/A | ACTATATTTTGGCTGG | 57 | AA | 1748 |
| 1410008 | 264511 | 264526 | N/A | N/A | CACCGTAACTACCTTG | 39 | AA | 1749 |
| 1410025 | 291486 | 291501 | N/A | N/A | GAAATTATGTGACTAG | 25 | AA | 1750 |
| 1410028 | 355954 | 355969 | N/A | N/A | CAGGTATTAAAGTCTA | 8 | AA | 1751 |
| 1410086 | 294161 | 294176 | N/A | N/A | CCATTTCAAACAAGGT | 71 | AA | 1752 |
| 1410097 | 254643 | 254658 | N/A | N/A | CTTTTACAGATCCTTA | 9 | AA | 1753 |
| 1410102 | 246406 | 246421 | N/A | N/A | GATACAATTTCAGTCC | 45 | AA | 1754 |
| 1410108 | 287453 | 287468 | N/A | N/A | AACTACATCAGAATGC | 41 | AA | 1755 |
| 1410132 | 397941 | 397956 | N/A | N/A | TTAATAATGTCAAGCC | 9 | AA | 1756 |
| 1410180 | 207452 | 207467 | N/A | N/A | ACAAAGTTCAGGCAGT | 41 | AA | 1757 |
| 1410250 | 211140 | 211155 | N/A | N/A | AATGTTTAACCCATCA | 65 | AA | 1758 |
| 1410256 | 184895 | 184910 | N/A | N/A | AAGTAGCTTATAGCCA | 23 | AA | 1759 |
| 1410301 | 277639 | 277654 | N/A | N/A | CCACTATGGAGACTGG | 55 | AA | 1760 |
| 1410333 | 290313 | 290328 | N/A | N/A | ATCTATACATAGTACA | 25 | AA | 1761 |
| 1410343 | 137232 | 137247 | N/A | N/A | CTTTATTCAGGAGAGC | 50 | AA | 1762 |
| 1410380 | 171304 | 171319 | N/A | N/A | CCAATAACATCCATTC | 18 | AA | 1763 |
| 1410488 | 191881 | 191896 | N/A | N/A | TACCTAACTTGCTGAG | 66 | AA | 1764 |
| 1410542 | 196822 | 196837 | N/A | N/A | GAGAAACTGCTTTCGC | 57 | AA | 1765 |
| 1410563 | 332271 | 332286 | N/A | N/A | CCTAAACAATTCTTCA | 29 | AA | 1766 |
| 1410564 | 229086 | 229101 | N/A | N/A | ATCATTTGATGCCATT | 13 | AA | 1767 |
| 1410570 | 221544 | 221559 | N/A | N/A | AAACTTGATACGGCAA | 22 | AA | 1768 |
| 1411178 | 559667 | 559682 | 8656 | 8671 | TTAAACCTGGTCCTGA | 33 | AA | 1769 |
| 1411188 | 558935 | 558950 | 7924 | 7939 | CAACTATAAATACCCA | 14 | AA | 1770 |
| 1411228 | 562339 | 562354 | 11328 | 11343 | TGTAAACTTAATTGTC | 30 | AA | 1771 |
| 1411240 | 222101 | 222116 | 1511 | 1526 | CAAAGCTAAAATAGCT | 83 | AA | 1772 |
| 1411251 | 217525 | 217540 | 491 | 506 | TCAAAGAGTCAATGGG | 8 | AA | 1773 |
| 1411253 | 557051 | 557066 | 6040 | 6055 | ATCATATGGAAGGAAG | 22 | AA | 1774 |
| 1411278 | 558068 | 558083 | 7057 | 7072 | GTTAAATTACAGAGAT | 50 | AA | 1775 |
| 1411284 | 556245 | 556260 | 5234 | 5249 | ATTTAGATTATCAGGT | 80 | AA | 1776 |
| 1411296 | 555475 | 555490 | 4464 | 4479 | GAGAAAGTTGAGTAGT | 61 | AA | 1777 |
| 1411329 | 560291 | 560306 | 9280 | 9295 | TCAAATGGTTACTTGG | 34 | AA | 1778 |
| 1411367 | 559329 | 559344 | 8318 | 8333 | CTAAAGTTACTAAGAC | 85 | AA | 1779 |
| 1411381 | 554412 | 554427 | 3401 | 3416 | AGCAAAGACAATCTGT | 17 | AA | 1780 |
| 1411415 | 561223 | 561238 | 10212 | 10227 | TTAAGTGAAACTCCAA | 15 | AA | 1781 |
| 1173403 | 288679 | 288694 | 2074 | 2089 | TCTATTGGAGAAGTGT | 4 | AB | 181 |
| 1408325 | 181273 | 181288 | N/A | N/A | TCTATTTAATGGTTCC | 3 | AB | 1782 |
| 1408350 | 225894 | 225909 | N/A | N/A | ATTTAAGTAAATCTAG | 77 | AB | 1783 |
| 1408472 | 222102 | 222117 | 1512 | 1527 | TCAAAGCTAAAATAGC | 60 | AB | 1784 |
| 1408557 | 288760 | 288775 | N/A | N/A | ACCATTGATATAAAAA | 93 | AB | 1785 |
| 1408582 | 290527 | 290542 | N/A | N/A | TGCTAGGTACAATTAG | 59 | AB | 1786 |
| 1408587 | 290709 | 290724 | N/A | N/A | TCACAAATCCACACTT | 81 | AB | 1787 |
| 1408615 | 188568 | 188583 | N/A | N/A | ACATTCAAGGGTATTA | 25 | AB | 1788 |
| 1408642 | 224923 | 224938 | N/A | N/A | CGATCAAAAGAAGAAT | 81 | AB | 1789 |
| 1408668 | 243394 | 243409 | N/A | N/A | TGCCAACAAATCAGTA | 75 | AB | 1790 |
| 1408669 | 217953 | 217968 | 919 | 934 | CCCAAGAGCAGACCTC | 14 | AB | 1791 |
| 1408683 | 249444 | 249459 | N/A | N/A | TTTACAGGCATTAACA | 26 | AB | 1792 |
| 1408699 | 263090 | 263105 | N/A | N/A | GTGATATCAATGGTAT | 33 | AB | 1793 |
| 1409096 | 120951 | 120966 | N/A | N/A | AAGTATATAGCCTTCC | 20 | AB | 1794 |
| 1409118 | 434232 | 434247 | N/A | N/A | ACCAAGTAATTCCTTC | 16 | AB | 1795 |
| 1409179 | 189806 | 189821 | N/A | N/A | GCATTACATTCTCCAA | 7 | AB | 1796 |
| 1409200 | 466182 | 466197 | N/A | N/A | CCAGAAGTAACAACCA | 7 | AB | 1797 |
| 1409227 | 254817 | 254832 | N/A | N/A | ATATCCTAAGAACCAG | 25 | AB | 1798 |
| 1409229 | 272839 | 272854 | N/A | N/A | CAATTTCAAAGTAGTC | 27 | AB | 1799 |
| 1409285 | 532200 | 532215 | N/A | N/A | GTCAAAAATGCTTCAG | 19 | AB | 1800 |
| 1409308 | 411688 | 411703 | N/A | N/A | GCTCATTAGACTGAGG | 48 | AB | 1801 |
| 1409376 | 447362 | 447377 | N/A | N/A | ACATAATCACATTCCA | 17 | AB | 1802 |
| 1409377 | 200587 | 200602 | N/A | N/A | GATATACAAACCAACC | 67 | AB | 1803 |
| 1409398 | 306835 | 306850 | N/A | N/A | ATTACTAAACTCTTCA | 24 | AB | 1804 |
| 1409445 | 211179 | 211194 | N/A | N/A | GCATAATGTTACTCAC | 28 | AB | 1805 |
| 1409448 | 247568 | 247583 | N/A | N/A | AAGATAAATAGCTCTC | 59 | AB | 1806 |
| 1409451 | 457967 | 457982 | N/A | N/A | AAGATAATCATGCCTC | 25 | AB | 1807 |
| 1409480 | 336174 | 336189 | N/A | N/A | CATTTTTGATGACTCA | 2 | AB | 1808 |
| 1409485 | 203773 | 203788 | N/A | N/A | GTAAGATTACAGGTAA | 46 | AB | 1809 |
| 1409528 | 287913 | 287928 | N/A | N/A | TCTATTAAAGCCACTA | 12 | AB | 1810 |
| 1409547 | 218775 | 218790 | N/A | N/A | GCCAAGGTTGGAAGTA | 64 | AB | 1811 |
| 1409555 | 79404 | 79419 | N/A | N/A | CTTAATTTGGAGCTTG | 8 | AB | 1812 |
| 1409573 | 229087 | 229102 | N/A | N/A | TATCATTTGATGCCAT | 15 | AB | 1813 |
| 1409593 | 104001 | 104016 | N/A | N/A | AAGATTACAGTTGTAT | 13 | AB | 1814 |
| 1409622 | 271044 | 271059 | N/A | N/A | GAATTCAGGGCATGTC | 76 | AB | 1815 |
| 1409640 | 196893 | 196908 | N/A | N/A | CAAATTGCAAGGTCAA | 39 | AB | 1816 |
| 1409679 | 284303 | 284318 | N/A | N/A | GCAAAACATGTGTTGA | 26 | AB | 1817 |
| 1409689 | 137245 | 137260 | N/A | N/A | GCAATTAAATACACTT | 31 | AB | 1818 |
| 1409730 | 205451 | 205466 | N/A | N/A | CTACGGTATGTAATCC | 26 | AB | 1819 |
| 1409750 | 232104 | 232119 | N/A | N/A | AGTAGAATACCTGCAA | 35 | AB | 1820 |
| 1409752 | 356426 | 356441 | N/A | N/A | GATTATTCTGAGTCCC | 5 | AB | 1821 |
| 1409807 | 257853 | 257868 | N/A | N/A | CTTTATTATAGGTGGA | 4 | AB | 1822 |
| 1409864 | 87132 | 87147 | N/A | N/A | TTCCATAAAGCACACC | 33 | AB | 1823 |
| 1409891 | 235004 | 235019 | N/A | N/A | AGAAACCAGGGACAGC | 18 | AB | 1824 |
| 1409948 | 174913 | 174928 | N/A | N/A | AAGGTATCAAGGACAC | 28 | AB | 1825 |
| 1409952 | 503623 | 503638 | N/A | N/A | CTTTACTATTACTCTC | 39 | AB | 1826 |
| 1409992 | 374016 | 374031 | N/A | N/A | GCAAATACATTGGTTG | 28 | AB | 1827 |
| 1410047 | 213627 | 213642 | N/A | N/A | ATAAGTTTCAGGGTCT | 34 | AB | 1828 |
| 1410058 | 397942 | 397957 | N/A | N/A | CTTAATAATGTCAAGC | 52 | AB | 1829 |
| 1410061 | 487477 | 487492 | N/A | N/A | CAACCTATAATCCTCC | 53 | AB | 1830 |
| 1410133 | 320907 | 320922 | N/A | N/A | CAAACAAGGTGTCTCA | 25 | AB | 1831 |
| 1410198 | 264525 | 264540 | N/A | N/A | GCTATAAGCATCCTCA | 64 | AB | 1832 |
| 1410239 | 47708 | 47723 | N/A | N/A | TAGAATTACATTCTGC | 73 | AB | 1833 |
| 1410244 | 262913 | 262928 | N/A | N/A | ACTGATATCAGTTACC | 58 | AB | 1834 |
| 1410245 | 221579 | 221594 | N/A | N/A | CCTAATTATAACAGAA | 85 | AB | 1835 |
| 1410277 | 281833 | 281848 | N/A | N/A | TACAATCAAGTACTTT | 30 | AB | 1836 |
| 1410342 | 291487 | 291502 | N/A | N/A | GGAAATTATGTGACTA | 7 | AB | 1837 |
| 1410358 | 207456 | 207471 | N/A | N/A | GCAAACAAAGTTCAGG | 18 | AB | 1838 |
| 1410368 | 277816 | 277831 | N/A | N/A | CACAATCTGATGTTGA | 25 | AB | 1839 |
| 1410387 | 184997 | 185012 | N/A | N/A | GTGTATTAGGTTTTTC | 5 | AB | 1840 |
| 1410403 | 239047 | 239062 | N/A | N/A | TCTTATGCATACCAGG | 18 | AB | 1841 |
| 1410446 | 547516 | 547531 | N/A | N/A | AAGTATTATATCTTCG | 52 | AB | 1842 |
| 1410461 | 191883 | 191898 | N/A | N/A | CTTACCTAACTTGCTG | 53 | AB | 1843 |
| 1410516 | 153620 | 153635 | N/A | N/A | TCTATAGGGAAGTCAG | 53 | AB | 1844 |
| 1410561 | 294165 | 294180 | N/A | N/A | CATACCATTTCAAACA | 48 | AB | 1845 |
| 1411092 | 559669 | 559684 | 8658 | 8673 | GTTTAAACCTGGTCCT | 44 | AB | 1846 |
| 1411103 | 562399 | 562414 | 11388 | 11403 | AGTGAAATAGGGTAAT | 24 | AB | 1847 |
| 1411111 | 560391 | 560406 | 9380 | 9395 | TAATTACTCTTGTTCC | 19 | AB | 1848 |
| 1411141 | 559336 | 559351 | 8325 | 8340 | CTTAATACTAAAGTTA | 81 | AB | 1849 |
| 1411177 | 557052 | 557067 | 6041 | 6056 | TATCATATGGAAGGAA | 28 | AB | 1850 |
| 1411202 | 517372 | 517387 | 2786 | 2801 | AAAATACAGCTGCCAC | 45 | AB | 1851 |
| 1411277 | 558936 | 558951 | 7925 | 7940 | ACAACTATAAATACCC | 15 | AB | 1852 |
| 1411279 | 561224 | 561239 | 10213 | 10228 | ATTAAGTGAAACTCCA | 18 | AB | 1853 |
| 1411295 | 217526 | 217541 | 492 | 507 | ATCAAAGAGTCAATGG | 4 | AB | 1854 |
| 1411343 | 555476 | 555491 | 4465 | 4480 | GGAGAAAGTTGAGTAG | 55 | AB | 1855 |
| 1411358 | 558070 | 558085 | 7059 | 7074 | GAGTTAAATTACAGAG | 5 | AB | 1856 |
| 1411392 | 556246 | 556261 | 5235 | 5250 | AATTTAGATTATCAGG | 78 | AB | 1857 |
| 1411437 | 554413 | 554428 | 3402 | 3417 | GAGCAAAGACAATCTG | 21 | AB | 1858 |
| 1173403 | 288679 | 288694 | 2074 | 2089 | TCTATTGGAGAAGTGT | 5 | AC | 181 |
| 1408276 | 217980 | 217995 | 946 | 961 | TCGATCACATCCCCCT | 19 | AC | 1859 |
| 1408324 | 181274 | 181289 | N/A | N/A | TTCTATTTAATGGTTC | 16 | AC | 1860 |
| 1408349 | 225895 | 225910 | N/A | N/A | GATTTAAGTAAATCTA | 104 | AC | 1861 |
| 1408543 | 288769 | 288784 | N/A | N/A | AGGAAAATAACCATTG | 24 | AC | 1862 |
| 1408570 | 290717 | 290732 | N/A | N/A | TCTAAGTTTCACAAAT | 62 | AC | 1863 |
| 1408591 | 290539 | 290554 | N/A | N/A | AAAACAGTACTGTGCT | 55 | AC | 1864 |
| 1408601 | 217531 | 217546 | 497 | 512 | CTGAAATCAAAGAGTC | 13 | AC | 1865 |
| 1408614 | 188578 | 188593 | N/A | N/A | TAATCCATTGACATTC | 82 | AC | 1866 |
| 1408622 | 189808 | 189823 | N/A | N/A | TGGCATTACATTCTCC | 7 | AC | 1867 |
| 1408641 | 224953 | 224968 | N/A | N/A | GCTTTATCAACACATG | 35 | AC | 1868 |
| 1408667 | 243404 | 243419 | N/A | N/A | GATCAACAAATGCCAA | 59 | AC | 1869 |
| 1408681 | 249484 | 249499 | N/A | N/A | TGTACTAAGCACTTCC | 12 | AC | 1870 |
| 1408715 | 263017 | 263032 | N/A | N/A | CATACCAAAGTGATAT | 92 | AC | 1871 |
| | 263099 | 263114 | | | | | | |
| 1408725 | 262929 | 262944 | N/A | N/A | AAAACAAAGTTCTCTC | 47 | AC | 1872 |
| 1409094 | 50081 | 50096 | N/A | N/A | TATATGGTATCAAGGA | 88 | AC | 1873 |
| 1409101 | 205606 | 205621 | N/A | N/A | TAACCCATTTTGCCCA | 38 | AC | 1874 |
| 1409111 | 264526 | 264541 | N/A | N/A | GGCTATAAGCATCCTC | 63 | AC | 1875 |
| 1409124 | 559018 | 559033 | 8007 | 8022 | ACTGATTAAGGACAAA | 25 | AC | 1876 |
| 1409127 | 185302 | 185317 | N/A | N/A | TTTACTCAAGGTCAGC | 4 | AC | 1877 |
| 1409170 | 80733 | 80748 | N/A | N/A | CCAATATTCAGATTCC | 4 | AC | 1878 |
| 1409174 | 277817 | 277832 | N/A | N/A | GCACAATCTGATGTTG | 33 | AC | 1879 |
| 1409190 | 321207 | 321222 | N/A | N/A | TACAATGACAGTGCTG | 24 | AC | 1880 |
| 1409203 | 489497 | 489512 | N/A | N/A | GAATCTAAATGATCAA | 84 | AC | 1881 |
| 1409256 | 532356 | 532371 | N/A | N/A | GACAAGATTCATTTCT | 68 | AC | 1882 |
| 1409284 | 381929 | 381944 | N/A | N/A | TTTATTCACAATCTCG | 8 | AC | 1883 |
| 1409510 | 411739 | 411754 | N/A | N/A | TGATATTTTGACCTAA | 80 | AC | 1884 |
| 1409549 | 287915 | 287930 | N/A | N/A | TCTCTATTAAAGCCAC | 9 | AC | 1885 |
| 1409563 | 104004 | 104019 | N/A | N/A | ACCAAGATTACAGTTG | 12 | AC | 1886 |
| 1409569 | 232106 | 232121 | N/A | N/A | CCAGTAGAATACCTGC | 46 | AC | 1887 |
| 1409611 | 284304 | 284319 | N/A | N/A | TGCAAAACATGTGTTG | 65 | AC | 1888 |
| 1409646 | 221591 | 221606 | N/A | N/A | ACTACCAGCATTCCTA | 52 | AC | 1889 |
| 1409673 | 201558 | 201573 | N/A | N/A | CCAATTATGTTACCTT | 27 | AC | 1890 |
| 1409685 | 254819 | 254834 | N/A | N/A | GCATATCCTAAGAACC | 14 | AC | 1891 |
| 1409687 | 248056 | 248071 | N/A | N/A | AATACTTCAGACCAGT | 37 | AC | 1892 |
| 1409695 | 281835 | 281850 | N/A | N/A | ATTACAATCAAGTACT | 60 | AC | 1893 |
| 1409712 | 239197 | 239212 | N/A | N/A | ATCAATAGCAGAGTTG | 66 | AC | 1894 |
| 1409719 | 337082 | 337097 | N/A | N/A | GCTTTTAGAATAGGTA | 5 | AC | 1895 |
| 1409778 | 214480 | 214495 | N/A | N/A | AACTGTACAACTATCA | 59 | AC | 1896 |
| 1409783 | 271047 | 271062 | N/A | N/A | GCAGAATTCAGGGCAT | 88 | AC | 1897 |
| 1409802 | 219940 | 219955 | N/A | N/A | CACATATCAAGGCCGC | 70 | AC | 1898 |
| 1409812 | 549486 | 549501 | N/A | N/A | ACAATAAAAGCTTTGC | 57 | AC | 1899 |
| 1409829 | 222123 | 222138 | 1533 | 1548 | ATCATTGGAGTGAGGG | 9 | AC | 1900 |
| 1409893 | 356715 | 356730 | N/A | N/A | ACTTTTTAGGGTCATA | 8 | AC | 1901 |
| 1409901 | 272971 | 272986 | N/A | N/A | ACAAATGCAGGCCTGG | 72 | AC | 1902 |
| 1409926 | 457970 | 457985 | N/A | N/A | ATCAAGATAATCATGC | 29 | AC | 1903 |
| 1409965 | 447369 | 447384 | N/A | N/A | GCTACTAACATAATCA | 47 | AC | 1904 |
| 1410045 | 192053 | 192068 | N/A | N/A | GATCATTTATCTGGCT | 77 | AC | 1905 |
| 1410078 | 121480 | 121495 | N/A | N/A | CTTTATAGACATCTCA | 23 | AC | 1906 |
| 1410094 | 87216 | 87231 | N/A | N/A | ATATTTTGATCTGAGG | 6 | AC | 1907 |
| 1410098 | 203774 | 203789 | N/A | N/A | AGTAAGATTACAGGTA | 35 | AC | 1908 |
| 1410118 | 176757 | 176772 | N/A | N/A | CCTTTTGAAAATCCTC | 16 | AC | 1909 |
| 1410161 | 291674 | 291689 | N/A | N/A | GAGTATTTTGAGATAT | 18 | AC | 1910 |
| 1410214 | 153621 | 153636 | N/A | N/A | ATCTATAGGGAAGTCA | 57 | AC | 1911 |
| 1410263 | 211180 | 211195 | N/A | N/A | AGCATAATGTTACTCA | 21 | AC | 1912 |
| 1410267 | 229161 | 229176 | N/A | N/A | AAGTATTAACCACCAT | 9 | AC | 1913 |
| 1410289 | 207457 | 207472 | N/A | N/A | CGCAAACAAAGTTCAG | 20 | AC | 1914 |
| 1410349 | 306836 | 306851 | N/A | N/A | GATTACTAAACTCTTC | 40 | AC | 1915 |
| 1410392 | 397944 | 397959 | N/A | N/A | TCCTTAATAATGTCAA | 9 | AC | 1916 |
| 1410410 | 196973 | 196988 | N/A | N/A | TCCAAGAAGTCAGTGA | 48 | AC | 1917 |
| 1410439 | 504124 | 504139 | N/A | N/A | ATTAGTTAAGTGACAG | 57 | AC | 1918 |
| 1410443 | 294383 | 294398 | N/A | N/A | ATCTATCTCACTCCTC | 21 | AC | 1919 |
| 1410467 | 257854 | 257869 | N/A | N/A | TCTTTATTATAGGTGG | 5 | AC | 1920 |
| 1410482 | 137272 | 137287 | N/A | N/A | CCAAAGCATACATGTT | 41 | AC | 1921 |
| 1410524 | 235010 | 235025 | N/A | N/A | CATCCGAGAAACCAGG | 12 | AC | 1922 |
| 1410562 | 466984 | 466999 | N/A | N/A | ATGCTATAATGATGGC | 69 | AC | 1923 |
| 1411108 | 559348 | 559363 | 8337 | 8352 | ACTTTAAGTGCTCTTA | 13 | AC | 1924 |
| 1411121 | 562402 | 562417 | 11391 | 11406 | AACAGTGAAATAGGGT | 17 | AC | 1925 |
| 1411125 | 517373 | 517388 | 2787 | 2802 | GAAAATACAGCTGCCA | 30 | AC | 1926 |
| 1411152 | 554471 | 554486 | 3460 | 3475 | CACAGAAAAGGTGCAT | 54 | AC | 1927 |
| 1411198 | 556247 | 556262 | 5236 | 5251 | TAATTTAGATTATCAG | 93 | AC | 1928 |
| 1411203 | 558276 | 558291 | 7265 | 7280 | ATACTATTTAAACTCC | 29 | AC | 1929 |
| 1411207 | N/A | N/A | 2269 | 2284 | GTACAGAGCTTTCAGC | 50 | AC | 1930 |
| 1411222 | 557053 | 557068 | 6042 | 6057 | TTATCATATGGAAGGA | 17 | AC | 1931 |
| 1411387 | 555526 | 555541 | 4515 | 4530 | CATTTTGAGTAGACAG | 41 | AC | 1932 |
| 1411427 | 560392 | 560407 | 9381 | 9396 | CTAATTACTCTTGTTC | 19 | AC | 1933 |
| 1411445 | 561586 | 561601 | 10575 | 10590 | TCAGAGAATCTTTGTC | 32 | AC | 1934 |
| 1411447 | 559672 | 559687 | 8661 | 8676 | AAAGTTTAAACCTGGT | 21 | AC | 1935 |
| 1173403 | 288679 | 288694 | 2074 | 2089 | TCTATTGGAGAAGTGT | 5 | AD | 181 |
| 1408268 | 217981 | 217996 | 947 | 962 | TTCGATCACATCCCCC | 16 | AD | 1936 |
| 1408323 | 181275 | 181290 | N/A | N/A | CTTCTATTTAATGGTT | 24 | AD | 1937 |
| 1408341 | 189825 | 189840 | N/A | N/A | ATCGAACCATCTTTTG | 57 | AD | 1938 |
| 1408556 | 288770 | 288785 | N/A | N/A | AAGGAAAATAACCATT | 76 | AD | 1939 |
| 1408586 | 290719 | 290734 | N/A | N/A | GATCTAAGTTTCACAA | 65 | AD | 1940 |
| 1408597 | 217561 | 217576 | 527 | 542 | AAATGATTCTGGCTTC | 5 | AD | 1941 |
| 1408613 | 188588 | 188603 | N/A | N/A | GTGGAGAATTTAATCC | 57 | AD | 1942 |
| 1408640 | 224983 | 224998 | N/A | N/A | TTCTTGAAAACAGACC | 30 | AD | 1943 |
| 1408647 | 225902 | 225917 | N/A | N/A | AGAAAAGGATTTAAGT | 93 | AD | 1944 |
| 1408664 | 235089 | 235104 | N/A | N/A | GTCCAAAGCCTGCTTC | 16 | AD | 1945 |
| 1408666 | 243454 | 243469 | N/A | N/A | CTCTGGGAGGTTGTAT | 36 | AD | 1946 |
| 1408680 | 249494 | 249509 | N/A | N/A | ATAGTTAGTGTGTACT | 28 | AD | 1947 |
| 1408698 | 263018 | 263033 | N/A | N/A | TCATACCAAAGTGATA | 66 | AD | 1948 |
| | 263100 | 263115 | | | | | | |
| 1408708 | 262930 | 262945 | N/A | N/A | GAAAACAAAGTTCTCT | 87 | AD | 1949 |
| 1408739 | 271049 | 271064 | N/A | N/A | AAGCAGAATTCAGGGC | 44 | AD | 1950 |
| 1409109 | 87217 | 87232 | N/A | N/A | CATATTTTGATCTGAG | 5 | AD | 1951 |
| 1409186 | 284416 | 284431 | N/A | N/A | AATCTAAATTTGTGTC | 41 | AD | 1952 |
| 1409270 | 272972 | 272987 | N/A | N/A | AACAAATGCAGGCCTG | 65 | AD | 1953 |
| 1409322 | 137480 | 137495 | N/A | N/A | CTTACATCAATTTACA | 67 | AD | 1954 |
| 1409348 | 307383 | 307398 | N/A | N/A | GATATTGGTAAAAGCA | 65 | AD | 1955 |
| 1409355 | 232276 | 232291 | N/A | N/A | GCAGATTCTAATGTAG | 21 | AD | 1956 |
| 1409356 | 290541 | 290556 | N/A | N/A | TGAAAACAGTACTGTG | 85 | AD | 1957 |
| 1409409 | 322554 | 322569 | N/A | N/A | AATACAAAGTGTACCA | 48 | AD | 1958 |
| 1409411 | 383230 | 383245 | N/A | N/A | GACATTAAACAGTCAC | 85 | AD | 1959 |
| 1409415 | 264802 | 264817 | N/A | N/A | CAGACCTAAAGTTTGA | 101 | AD | 1960 |
| 1409425 | 281965 | 281980 | N/A | N/A | TCATTATCGACAGTAT | 14 | AD | 1961 |
| 1409446 | 287995 | 288010 | N/A | N/A | TCAATACATCATCATA | 27 | AD | 1962 |
| 1409477 | 504149 | 504164 | N/A | N/A | GATAATTAACTGCTCC | 67 | AD | 1963 |
| 1409499 | 229163 | 229178 | N/A | N/A | TAAAGTATTAACCACC | 5 | AD | 1964 |
| 1409557 | 239384 | 239399 | N/A | N/A | GTTATTTAAAAGGAGG | 30 | AD | 1965 |
| 1409567 | 201680 | 201695 | N/A | N/A | GCCTTAAAACTTTCCA | 54 | AD | 1966 |
| 1409589 | 207475 | 207490 | N/A | N/A | CTATATATACTGTCTG | 28 | AD | 1967 |
| 1409665 | 121481 | 121496 | N/A | N/A | TCTTTATAGACATCTC | 11 | AD | 1968 |
| 1409676 | 549518 | 549533 | N/A | N/A | GATAATTCTTAAGTGG | 37 | AD | 1969 |
| 1409754 | 219941 | 219956 | N/A | N/A | CCACATATCAAGGCCG | 73 | AD | 1970 |
| 1409797 | 203776 | 203791 | N/A | N/A | GAAGTAAGATTACAGG | 27 | AD | 1971 |
| 1409815 | 53231 | 53246 | N/A | N/A | GACTATCTCATTGCCA | 86 | AD | 1972 |
| 1409842 | 257866 | 257881 | N/A | N/A | CTTGAAATATGGTCTT | 4 | AD | 1973 |
| 1409857 | 198095 | 198110 | N/A | N/A | GATATATTGAGTATTC | 65 | AD | 1974 |
| 1409878 | 104015 | 104030 | N/A | N/A | TCTATTTAAAGACCAA | 11 | AD | 1975 |
| 1409880 | 397957 | 397972 | N/A | N/A | GAATTTCTATCAGTCC | 11 | AD | 1976 |
| 1409931 | 176852 | 176867 | N/A | N/A | CCTATTTCAATGCATT | 45 | AD | 1977 |
| 1410010 | 458017 | 458032 | N/A | N/A | CTATATAAGCATGCTC | 35 | AD | 1978 |
| 1410017 | 185324 | 185339 | N/A | N/A | AATTATGTTACAGCTG | 46 | AD | 1979 |
| 1410030 | 532816 | 532831 | N/A | N/A | GAAAATGTATGACTCC | 29 | AD | 1980 |
| 1410088 | 358502 | 358517 | N/A | N/A | ATCAAACATGATCTCA | 6 | AD | 1981 |
| 1410095 | 467368 | 467383 | N/A | N/A | GTACATAAGTGTACAA | 79 | AD | 1982 |
| 1410197 | 278098 | 278113 | N/A | N/A | CCATTTAGTAACAGAA | 30 | AD | 1983 |
| 1410259 | 221592 | 221607 | N/A | N/A | AACTACCAGCATTCCT | 70 | AD | 1984 |
| 1410268 | 214517 | 214532 | N/A | N/A | ACCTTTTAAGATTCAG | 32 | AD | 1985 |
| 1410314 | 80930 | 80945 | N/A | N/A | CTTTATTGTGAATTCC | 5 | AD | 1986 |
| 1410327 | 337106 | 337121 | N/A | N/A | CTCAAGGAATAATTGC | 6 | AD | 1987 |
| 1410376 | 447418 | 447433 | N/A | N/A | CATAATTCTTTGCTCC | 45 | AD | 1988 |
| 1410397 | 211471 | 211486 | N/A | N/A | CCTAATACACACTGGA | 87 | AD | 1989 |
| 1410407 | 294533 | 294548 | N/A | N/A | GATGTTAAAAGGTACA | 6 | AD | 1990 |
| 1410411 | 192171 | 192186 | N/A | N/A | GTATATAGAAACACCA | 24 | AD | 1991 |
| 1410495 | 414826 | 414841 | N/A | N/A | TTTACTTATGCTGGGA | 5 | AD | 1992 |
| 1410515 | 248317 | 248332 | N/A | N/A | ATAATGAAGATAGCCA | 8 | AD | 1993 |
| 1410518 | 254884 | 254899 | N/A | N/A | CATACATTAAAGGCAG | 37 | AD | 1994 |
| 1410566 | 291717 | 291732 | N/A | N/A | TCTAAATTCACCTCTT | 23 | AD | 1995 |
| 1410584 | 205616 | 205631 | N/A | N/A | GAGGATAATCTAACCC | 61 | AD | 1996 |
| 1411110 | 559349 | 559364 | 8338 | 8353 | GACTTTAAGTGCTCTT | 10 | AD | 1997 |
| 1411126 | 559027 | 559042 | 8016 | 8031 | TCATATCACACTGATT | 36 | AD | 1998 |
| 1411137 | 555527 | 555542 | 4516 | 4531 | CCATTTTGAGTAGACA | 17 | AD | 1999 |
| 1411234 | 559747 | 559762 | 8736 | 8751 | CAAACAACTAAGGCCA | 59 | AD | 2000 |
| 1411247 | 434321 | 434336 | 2281 | 2296 | CTTGATTGAGTTGTAC | 41 | AD | 2001 |
| 1411256 | 554493 | 554508 | 3482 | 3497 | GAAATCACGATCCCCT | 30 | AD | 2002 |
| 1411261 | 558277 | 558292 | 7266 | 7281 | GATACTATTTAAACTC | 28 | AD | 2003 |
| 1411288 | 562413 | 562428 | 11402 | 11417 | TTTACTTGAACAACAG | 19 | AD | 2004 |
| 1411293 | 517418 | 517433 | 2832 | 2847 | CTAAACTTCTTCTGAG | 77 | AD | 2005 |
| 1411300 | 153861 | 153876 | 127 | 142 | CCAAACAAATGTCTCT | 9 | AD | 2006 |
| 1411316 | 489611 | 489626 | 2558 | 2573 | AAAGAACTGTTCCCTT | 45† | AD | 2007 |
| 1411335 | 557056 | 557071 | 6045 | 6060 | GATTTATCATATGGAA | 16 | AD | 2008 |
| 1411348 | 222124 | 222139 | 1534 | 1549 | TATCATTGGAGTGAGG | 6 | AD | 2009 |
| 1411356 | 560394 | 560409 | 9383 | 9398 | GTCTAATTACTCTTGT | 18 | AD | 2010 |
| 1411380 | 556249 | 556264 | 5238 | 5253 | GATAATTTAGATTATC | 91 | AD | 2011 |
| 1411417 | 561617 | 561632 | 10606 | 10621 | GCAAAGGTAAAATACG | 20 | AD | 2012 |
| 1173403 | 288679 | 288694 | 2074 | 2089 | TCTATTGGAGAAGTGT | 9 | AE | 181 |
| 1408243 | 217984 | 217999 | 950 | 965 | TGCTTCGATCACATCC | 21 | AE | 2013 |
| 1408302 | 222139 | 222154 | 1549 | 1564 | TTTAATGCGCTGTTGT | 13 | AE | 2014 |
| 1408322 | 82197 | 82212 | N/A | N/A | ATTAGCTCATGGAAAG | 36 | AE | 2015 |
| 1408340 | 189826 | 189841 | N/A | N/A | TATCGAACCATCTTTT | 52 | AE | 2016 |
| 1408551 | 288529 | 288544 | N/A | N/A | TTTATATAAACCTAAG | 84 | AE | 2017 |
| 1408555 | 288780 | 288795 | N/A | N/A | CTTTCATAATAAGGAA | 90 | AE | 2018 |
| 1408602 | 181302 | 181317 | N/A | N/A | ATCATTTGGCACTTAA | 49 | AE | 2019 |
| 1408612 | 188608 | 188623 | N/A | N/A | AGCCAGTCTATATCTT | 62 | AE | 2020 |
| 1408639 | 224993 | 225008 | N/A | N/A | AGAACTTAGTTTCTTG | 71 | AE | 2021 |
| 1408646 | 225922 | 225937 | N/A | N/A | GTAAAGACAGATCTTG | 21 | AE | 2022 |
| 1408663 | 235109 | 235124 | N/A | N/A | TATTTATTGTCCTGTT | 17 | AE | 2023 |
| 1408665 | 243464 | 243479 | N/A | N/A | CCATGAATGTCTCTGG | 82 | AE | 2024 |
| 1408679 | 249504 | 249519 | N/A | N/A | GACAAAAACGATAGTT | 66 | AE | 2025 |
| 1408714 | 263109 | 263124 | N/A | N/A | AGTACCAGCTCATACC | 59 | AE | 2026 |
| 1408724 | 262939 | 262954 | N/A | N/A | GCTTAAGAGGAAAACA | 56 | AE | 2027 |
| 1408738 | 271059 | 271074 | N/A | N/A | ACAGGTAAACAAGCAG | 57 | AE | 2028 |
| 1409103 | 290545 | 290560 | N/A | N/A | CCTATGAAAACAGTAC | 88 | AE | 2029 |
| 1409107 | 337133 | 337148 | N/A | N/A | AGAGTAACAATGTACC | 13 | AE | 2030 |
| 1409108 | 307518 | 307533 | N/A | N/A | GTGGATAAAGCTGTGG | 16 | AE | 2031 |
| 1409145 | 239542 | 239557 | N/A | N/A | GCAGATTATAGGCAAG | 20 | AE | 2032 |
| 1409192 | 290720 | 290735 | N/A | N/A | GGATCTAAGTTTCACA | 59 | AE | 2033 |
| 1409224 | 229260 | 229275 | N/A | N/A | GCTAAGAGACCTCTGC | 74 | AE | 2034 |
| 1409232 | 211473 | 211488 | N/A | N/A | ATCCTAATACACACTG | 74 | AE | 2035 |
| 1409250 | 458018 | 458033 | N/A | N/A | ACTATATAAGCATGCT | 63 | AE | 2036 |
| 1409327 | 467986 | 468001 | N/A | N/A | AACTTTTGATGACAGG | 5 | AE | 2037 |
| 1409476 | 278273 | 278288 | N/A | N/A | CATGTTAGATGTGTGA | 92 | AE | 2038 |
| 1409542 | 549802 | 549817 | N/A | N/A | TCTGATAGAAGGTGGT | 24 | AE | 2039 |
| 1409571 | 176938 | 176953 | N/A | N/A | TTAATCTAAACAACTT | 81 | AE | 2040 |
| 1409615 | 205660 | 205675 | N/A | N/A | CAAATTTGCAATGCAA | 82 | AE | 2041 |
| 1409617 | 121633 | 121648 | N/A | N/A | GCAGAATGTGTATATC | 12 | AE | 2042 |
| 1409629 | 322556 | 322571 | N/A | N/A | TGAATACAAAGTGTAC | 54 | AE | 2043 |
| 1409671 | 284417 | 284432 | N/A | N/A | GAATCTAAATTTGTGT | 70 | AE | 2044 |
| 1409708 | 360233 | 360248 | N/A | N/A | ACAAATGCCATTCTGG | 24 | AE | 2045 |
| 1409727 | 192172 | 192187 | N/A | N/A | GGTATATAGAAACACC | 84 | AE | 2046 |
| 1409746 | 416547 | 416562 | N/A | N/A | TACGAATCTATCTCTA | 79 | AE | 2047 |
| 1409765 | 88243 | 88258 | N/A | N/A | CTCAGAGAAGGAAGGT | 28 | AE | 2048 |
| 1409786 | 272974 | 272989 | N/A | N/A | CAAACAAATGCAGGCC | 66 | AE | 2049 |
| 1409809 | 219960 | 219975 | N/A | N/A | ATAAACACTGGGCCAC | 80 | AE | 2050 |
| 1409867 | 208111 | 208126 | N/A | N/A | TCAATTATGAATGTCC | 25 | AE | 2051 |
| 1409875 | 221593 | 221608 | N/A | N/A | CAACTACCAGCATTCC | 60 | AE | 2052 |
| 1409877 | 203825 | 203840 | N/A | N/A | ACAGAATTGTGTGTTC | 49 | AE | 2053 |
| 1409924 | 198159 | 198174 | N/A | N/A | AATGTAAGACCACTCC | 62 | AE | 2054 |
| 1409954 | 137509 | 137524 | N/A | N/A | AGTAAAATCTGGTTCA | 31 | AE | 2055 |
| 1409982 | 505317 | 505332 | N/A | N/A | ATGTATAATGCTCTGA | 32 | AE | 2056 |
| 1409988 | 264954 | 264969 | N/A | N/A | GATTTATTTGACTATG | 39 | AE | 2057 |
| 1410011 | 384074 | 384089 | N/A | N/A | CACAAATATCTACTGC | 52 | AE | 2058 |
| 1410033 | 434410 | 434425 | N/A | N/A | GGCATAAAGACAGTAG | 27 | AE | 2059 |
| 1410039 | 294740 | 294755 | N/A | N/A | TAAACTCAGACCACAG | 36 | AE | 2060 |
| 1410136 | 257938 | 257953 | N/A | N/A | CCAACAAAACAGCACC | 14 | AE | 2061 |
| 1410145 | 248352 | 248367 | N/A | N/A | CTAGTATCAACCAGTC | 61 | AE | 2062 |
| 1410150 | 185326 | 185341 | N/A | N/A | GTAATTATGTTACAGC | 57 | AE | 2063 |
| 1410229 | 54647 | 54662 | N/A | N/A | TTTAATTAGTTGTTGG | 96 | AE | 2064 |
| 1410249 | 532985 | 533000 | N/A | N/A | CATTATTATAGGTACC | 76 | AE | 2065 |
| 1410281 | 397964 | 397979 | N/A | N/A | CACTTATGAATTTCTA | 41 | AE | 2066 |
| 1410290 | 232653 | 232668 | N/A | N/A | GCAAATTTTGCTCGAG | 48 | AE | 2067 |
| 1410347 | 291803 | 291818 | N/A | N/A | CCCAAGAATGCTTCCT | 16 | AE | 2068 |
| 1410395 | 254899 | 254914 | N/A | N/A | AGAAATACAGGCACTC | 73 | AE | 2069 |
| 1410398 | 281969 | 281984 | N/A | N/A | ATAATCATTATCGACA | 38 | AE | 2070 |
| 1410460 | 104404 | 104419 | N/A | N/A | ACATTAGTTTACTTGT | 86 | AE | 2071 |
| 1410500 | 202027 | 202042 | N/A | N/A | ACTACTAAAACTCAAG | 79 | AE | 2072 |
| 1410510 | 448071 | 448086 | N/A | N/A | AGAAAGCATGTAGTTA | 29 | AE | 2073 |
| 1410549 | 153862 | 153877 | 128 | 143 | CCCAAACAAATGTCTC | 9 | AE | 2074 |
| 1410568 | 214518 | 214533 | N/A | N/A | CACCTTTTAAGATTCA | 51 | AE | 2075 |
| 1411114 | 489613 | 489628 | 2560 | 2575 | GTAAAGAACTGTTCCC | 28† | AE | 2076 |
| 1411123 | 559058 | 559073 | 8047 | 8062 | ATAATCAGTCCTATGA | 62 | AE | 2077 |
| 1411139 | 556251 | 556266 | 5240 | 5255 | CTGATAATTTAGATTA | 91 | AE | 2078 |
| 1411197 | 217562 | 217577 | 528 | 543 | GAAATGATTCTGGCTT | 7 | AE | 2079 |
| 1411211 | 559756 | 559771 | 8745 | 8760 | CAGTAAGCTCAAACAA | 39 | AE | 2080 |
| 1411215 | 562484 | 562499 | 11473 | 11488 | CACAATAAATGTACTC | 53 | AE | 2081 |
| 1411220 | 558363 | 558378 | 7352 | 7367 | AGGTAGGAGGCCCAGA | 38 | AE | 2082 |
| 1411262 | 517419 | 517434 | 2833 | 2848 | GCTAAACTTCTTCTGA | 54 | AE | 2083 |
| 1411289 | 554496 | 554511 | 3485 | 3500 | TCTGAAATCACGATCC | 37 | AE | 2084 |
| 1411292 | 557226 | 557241 | 6215 | 6230 | CCTGTAAAAGCCAGCA | 34 | AE | 2085 |
| 1411310 | 559376 | 559391 | 8365 | 8380 | TTGTAATAAGCCCAAA | 46 | AE | 2086 |
| 1411328 | 555529 | 555544 | 4518 | 4533 | AACCATTTTGAGTAGA | 28 | AE | 2087 |
| 1411337 | 560442 | 560457 | 9431 | 9446 | ACCCTAAATGGAAAGC | 43 | AE | 2088 |
| 1411349 | 561749 | 561764 | 10738 | 10753 | GCTAAGCTAGCACTTG | 48 | AE | 2089 |
| 1173403 | 288679 | 288694 | 2074 | 2089 | TCTATTGGAGAAGTGT | 4 | AF | 181 |
| 1408301 | 222140 | 222155 | 1550 | 1565 | CTTTAATGCGCTGTTG | 8 | AF | 2090 |
| 1408321 | 82198 | 82213 | N/A | N/A | TATTAGCTCATGGAAA | 49 | AF | 2091 |
| 1408339 | 189827 | 189842 | N/A | N/A | TTATCGAACCATCTTT | 46 | AF | 2092 |
| 1408347 | 217986 | 218001 | 952 | 967 | GCTGCTTCGATCACAT | 29 | AF | 2093 |
| 1408531 | 288809 | 288824 | N/A | N/A | GATACATAATTTCTCA | 43 | AF | 2094 |
| 1408550 | 288549 | 288564 | N/A | N/A | CTTTCATAGTTAAAAG | 92 | AF | 2095 |
| 1408569 | 290727 | 290742 | N/A | N/A | ATGTTTTGGATCTAAG | 28 | AF | 2096 |
| 1408581 | 290547 | 290562 | N/A | N/A | AACCTATGAAAACAGT | 64 | AF | 2097 |
| 1408600 | 181392 | 181407 | N/A | N/A | TCAAACAGTCTGTCTC | 25 | AF | 2098 |
| 1408611 | 188668 | 188683 | N/A | N/A | ACAGGTAAAGTGAGTT | 46 | AF | 2099 |
| 1408638 | 225003 | 225018 | N/A | N/A | CTCTACATTTAGAACT | 66 | AF | 2100 |
| 1408645 | 225932 | 225947 | N/A | N/A | TAATGACAAAGTAAAG | 82 | AF | 2101 |
| 1408662 | 235179 | 235194 | N/A | N/A | TAATCTCATGTAATTT | 84 | AF | 2102 |
| 1408678 | 249514 | 249529 | N/A | N/A | AAAGCATTCAGACAAA | 27 | AF | 2103 |
| 1408697 | 263110 | 263125 | N/A | N/A | TAGTACCAGCTCATAC | 54 | AF | 2104 |
| 1408707 | 262940 | 262955 | N/A | N/A | AGCTTAAGAGGAAAAC | 65 | AF | 2105 |
| 1408737 | 271129 | 271144 | N/A | N/A | ATAGGAATCCCCTTGG | 53 | AF | 2106 |
| 1409121 | 417048 | 417063 | N/A | N/A | ACCTATATATGCTGTC | 70 | AF | 2107 |
| 1409122 | 205698 | 205713 | N/A | N/A | ATCAATAAACTTCACC | 52 | AF | 2108 |
| 1409146 | 211477 | 211492 | N/A | N/A | TCTAATCCTAATACAC | 85 | AF | 2109 |
| 1409196 | 177169 | 177184 | N/A | N/A | ATCTACCCACTATTCC | 41 | AF | 2110 |
| 1409197 | 337228 | 337243 | N/A | N/A | GCAAATAACCTTTCGA | 11 | AF | 2111 |
| 1409198 | 258634 | 258649 | N/A | N/A | CATATAGTAATTTCAC | 34 | AF | 2112 |
| 1409206 | 434480 | 434495 | N/A | N/A | TAGGTAAGACACTTGG | 8 | AF | 2113 |
| 1409209 | 398484 | 398499 | N/A | N/A | GCATTATAAACTCTTC | 16 | AF | 2114 |
| 1409235 | 254931 | 254946 | N/A | N/A | AGCACTTAGACAAAGG | 51 | AF | 2115 |
| 1409261 | 448129 | 448144 | N/A | N/A | TATACCACGAGGCAGG | 64 | AF | 2116 |
| 1409460 | 273425 | 273440 | N/A | N/A | AAGTATACACAACCAA | 85 | AF | 2117 |
| 1409554 | 208112 | 208127 | N/A | N/A | ATCAATTATGAATGTC | 51 | AF | 2118 |
| 1409599 | 233129 | 233144 | N/A | N/A | ACTGATAATAGCCAAC | 4 | AF | 2119 |
| 1409602 | 214738 | 214753 | N/A | N/A | ATGGAATCTAACAAGC | 76 | AF | 2120 |
| 1409686 | 458019 | 458034 | N/A | N/A | AACTATATAAGCATGC | 90 | AF | 2121 |
| 1409692 | 221602 | 221617 | N/A | N/A | GATTATTTGCAACTAC | 59 | AF | 2122 |
| 1409772 | 198160 | 198175 | N/A | N/A | TAATGTAAGACCACTC | 62 | AF | 2123 |
| 1409816 | 384868 | 384883 | N/A | N/A | GCACAAAAACATCTGC | 84 | AF | 2124 |
| 1409836 | 239693 | 239708 | N/A | N/A | CTCTATTTCAGCCACC | 52 | AF | 2125 |
| 1409868 | 550824 | 550839 | N/A | N/A | AGGTATTAGTTTTAGC | 11 | AF | 2126 |
| 1409913 | 505318 | 505333 | N/A | N/A | GATGTATAATGCTCTG | 7 | AF | 2127 |
| 1409916 | 265119 | 265134 | N/A | N/A | CCTTTTAGTCAAGTAT | 20 | AF | 2128 |
| 1409942 | 185327 | 185342 | N/A | N/A | TGTAATTATGTTACAG | 79 | AF | 2129 |
| 1409971 | 137512 | 137527 | N/A | N/A | GATAGTAAAATCTGGT | 10 | AF | 2130 |
| 1410019 | 292076 | 292091 | N/A | N/A | AATGTTATATGTGGCC | 25 | AF | 2131 |
| 1410040 | 361754 | 361769 | N/A | N/A | TGAAATACTCATTGCA | 35 | AF | 2132 |
| 1410138 | 88874 | 88889 | N/A | N/A | TTAGATAAGATCTTGC | 35 | AF | 2133 |
| 1410189 | 203856 | 203871 | N/A | N/A | TATATCACAAACAGGG | 65 | AF | 2134 |
| 1410218 | 229271 | 229286 | N/A | N/A | GCAAATATGGTGCTAA | 6 | AF | 2135 |
| 1410231 | 243928 | 243943 | N/A | N/A | GCTTATCAATTTGACT | 16 | AF | 2136 |
| 1410234 | 284425 | 284440 | N/A | N/A | GCAATATGGAATCTAA | 13 | AF | 2137 |
| 1410257 | 282017 | 282032 | N/A | N/A | TTAACACTACCATTCA | 48 | AF | 2138 |
| 1410292 | 202056 | 202071 | N/A | N/A | TACTATGATTAACCCA | 23 | AF | 2139 |
| 1410308 | 54920 | 54935 | N/A | N/A | GACTATCAGATTCAGT | 86 | AF | 2140 |
| 1410324 | 105365 | 105380 | N/A | N/A | GAATTTTGTAGTCTTA | 5 | AF | 2141 |
| 1410334 | 322573 | 322588 | N/A | N/A | GCAAAATGTAGTCCAA | 15 | AF | 2142 |
| 1410344 | 294826 | 294841 | N/A | N/A | CCAGTAAGTTGTACTA | 43 | AF | 2143 |
| 1410406 | 124981 | 124996 | N/A | N/A | CTCATAAAAAGGTTCA | 35 | AF | 2144 |
| 1410422 | 278692 | 278707 | N/A | N/A | TTTACTACTATCCATT | 47 | AF | 2145 |
| 1410425 | 308221 | 308236 | N/A | N/A | TTTACCTATTATTTCG | 33 | AF | 2146 |
| 1410473 | 219964 | 219979 | N/A | N/A | GAATATAAACACTGGG | 77 | AF | 2147 |
| 1410508 | 248354 | 248369 | N/A | N/A | AGCTAGTATCAACCAG | 56 | AF | 2148 |
| 1410536 | 532986 | 533001 | N/A | N/A | GCATTATTATAGGTAC | 92 | AF | 2149 |
| 1410537 | 154040 | 154055 | N/A | N/A | AGAAAGTAATGCAGGT | 7 | AF | 2150 |
| 1410572 | 192451 | 192466 | N/A | N/A | GATGAATGACACTGGT | 5 | AF | 2151 |
| 1410587 | 467988 | 468003 | N/A | N/A | TAAACTTTTGATGACA | 60 | AF | 2152 |
| 1411109 | 561960 | 561975 | 10949 | 10964 | ATTATAATAGGCTGGA | 10 | AF | 2153 |
| 1411166 | 517420 | 517435 | 2834 | 2849 | GGCTAAACTTCTTCTG | 43 | AF | 2154 |
| 1411179 | 562539 | 562554 | 11528 | 11543 | ACAAAATATCCCCAAC | 62 | AF | 2155 |
| 1411189 | 559081 | 559096 | 8070 | 8085 | TATACTCTCAACAACT | 48 | AF | 2156 |
| 1411225 | 556252 | 556267 | 5241 | 5256 | CCTGATAATTTAGATT | 86 | AF | 2157 |
| 1411254 | 560460 | 560475 | 9449 | 9464 | CTAACCACATGCATGG | 60 | AF | 2158 |
| 1411264 | 558440 | 558455 | 7429 | 7444 | GTGGAAAGAAATTTGC | 27 | AF | 2159 |
| 1411274 | 557265 | 557280 | 6254 | 6269 | ATTAAGTTTTGATTGC | 18 | AF | 2160 |
| 1411283 | 217564 | 217579 | 530 | 545 | CGGAAATGATTCTGGC | 13 | AF | 2161 |
| 1411388 | 489614 | 489629 | 2561 | 2576 | AGTAAAGAACTGTTCC | 39† | AF | 2162 |
| 1411397 | 555533 | 555548 | 4522 | 4537 | ATAGAACCATTTTGAG | 57 | AF | 2163 |
| 1411432 | 554554 | 554569 | 3543 | 3558 | AACAACTGAGCAGACT | 23 | AF | 2164 |
| 1411433 | 559761 | 559776 | 8750 | 8765 | ATAAGCAGTAAGCTCA | 36 | AF | 2165 |
| 1411436 | 559377 | 559392 | 8366 | 8381 | TTTGTAATAAGCCCAA | 20 | AF | 2166 |
| 1173403 | 288679 | 288694 | 2074 | 2089 | TCTATTGGAGAAGTGT | 7 | AG | 181 |
| 1408300 | 222141 | 222156 | 1551 | 1566 | TCTTTAATGCGCTGTT | 8 | AG | 2167 |
| 1408320 | 82199 | 82214 | N/A | N/A | ATATTAGCTCATGGAA | 15 | AG | 2168 |
| 1408337 | 189829 | 189844 | N/A | N/A | AATTATCGAACCATCT | 49 | AG | 2169 |
| 1408554 | 288810 | 288825 | N/A | N/A | AGATACATAATTTCTC | 77 | AG | 2170 |
| 1408568 | 290737 | 290752 | N/A | N/A | TAAGCCCGACATGTTT | 63 | AG | 2171 |
| 1408590 | 290549 | 290564 | N/A | N/A | AGAACCTATGAAAACA | 59 | AG | 2172 |
| 1408637 | 225013 | 225028 | N/A | N/A | CAACAAGCAGCTCTAC | 61 | AG | 2173 |
| 1408643 | 226002 | 226017 | N/A | N/A | CAGCCGAGAACAGTGT | 45 | AG | 2174 |
| 1408659 | 235182 | 235197 | N/A | N/A | ACTTAATCTCATGTAA | 71 | AG | 2175 |
| 1408705 | 262950 | 262965 | N/A | N/A | TAAGAGCAGCAGCTTA | 79 | AG | 2176 |
| 1408713 | 263119 | 263134 | N/A | N/A | TAATATAATTAGTACC | 97 | AG | 2177 |
| 1408736 | 271139 | 271154 | N/A | N/A | GTAAATTTAAATAGGA | 107 | AG | 2178 |
| 1409115 | 387073 | 387088 | N/A | N/A | GCTATAGGTACTCTTT | 8 | AG | 2179 |
| | 387391 | 387406 | | | | | | |
| 1409166 | 155024 | 155039 | N/A | N/A | TTAACAGGATGAGCTC | 68 | AG | 2180 |
| 1409180 | 105598 | 105613 | N/A | N/A | CAAATTTATAGCCCAT | 12 | AG | 2181 |
| 1409228 | 458503 | 458518 | N/A | N/A | TGTATAAAGGACCTCA | 21 | AG | 2182 |
| 1409312 | 278791 | 278806 | N/A | N/A | GAAACAGGCAATAGTA | 30 | AG | 2183 |
| 1409388 | 418701 | 418716 | N/A | N/A | TCAAATGCAAGATGCT | 51 | AG | 2184 |
| 1409461 | 361863 | 361878 | N/A | N/A | TATCATTATAGGTTCA | 8 | AG | 2185 |
| 1409596 | 259054 | 259069 | N/A | N/A | GAAACCATTCATTCTA | 40 | AG | 2186 |
| 1409627 | 185536 | 185551 | N/A | N/A | CAGGATACAAGACATG | 50 | AG | 2187 |
| 1409717 | 294827 | 294842 | N/A | N/A | ACCAGTAAGTTGTACT | 73 | AG | 2188 |
| 1409724 | 233179 | 233194 | N/A | N/A | GACTTTGAAGAGGTTT | 30 | AG | 2189 |
| 1409732 | 219965 | 219980 | N/A | N/A | GGAATATAAACACTGG | 59 | AG | 2190 |
| 1409745 | 181434 | 181449 | N/A | N/A | ATAACCACATATCCCT | 38 | AG | 2191 |
| 1409769 | 198251 | 198266 | N/A | N/A | GTTATTTCAAGCTCAT | 12 | AG | 2192 |
| 1409775 | 561963 | 561978 | 10952 | 10967 | GTTATTATAATAGGCT | 17 | AG | 2193 |
| 1409819 | 192509 | 192524 | N/A | N/A | CTATCCAGGGTATTGT | 67 | AG | 2194 |
| 1409820 | 265364 | 265379 | N/A | N/A | CAGAATAAATTCAGGG | 21 | AG | 2195 |
| 1409821 | 215856 | 215871 | N/A | N/A | CATTAGTTGTTACCAT | 64 | AG | 2196 |
| 1409822 | 202220 | 202235 | N/A | N/A | GCCAAACAGGGTGCTG | 86 | AG | 2197 |
| 1409843 | 244047 | 244062 | N/A | N/A | GTAATAATCTCCACTC | 27 | AG | 2198 |
| 1409851 | 448132 | 448147 | N/A | N/A | CATTATACCACGAGGC | 32 | AG | 2199 |
| 1409872 | 469120 | 469135 | N/A | N/A | GAATTTGACACACTGC | 7 | AG | 2200 |
| 1409890 | 506047 | 506062 | N/A | N/A | GTAAATTTATGGCCCT | 30 | AG | 2201 |
| 1409950 | 249874 | 249889 | N/A | N/A | GCAAAATCACTCCACA | 30 | AG | 2202 |
| 1409990 | 518152 | 518167 | N/A | N/A | AATCTTTAACTAGTCA | 31 | AG | 2203 |
| 1410013 | 221791 | 221806 | N/A | N/A | ACATATTTGGGAAGGA | 38 | AG | 2204 |
| 1410022 | 124982 | 124997 | N/A | N/A | GCTCATAAAAAGGTTC | 25 | AG | 2205 |
| 1410037 | 322574 | 322589 | N/A | N/A | AGCAAAATGTAGTCCA | 23 | AG | 2206 |
| 1410050 | 208573 | 208588 | N/A | N/A | AATTATCCTGTTTGAG | 79 | AG | 2207 |
| 1410051 | 282020 | 282035 | N/A | N/A | GACTTAACACTACCAT | 46 | AG | 2208 |
| 1410128 | 205748 | 205763 | N/A | N/A | GTAACTATAATCCTTA | 60 | AG | 2209 |
| 1410137 | 292176 | 292191 | N/A | N/A | AGTTAACAGATGCTAA | 29 | AG | 2210 |
| 1410157 | 177209 | 177224 | N/A | N/A | ACAAATTTCAAGCTAG | 74 | AG | 2211 |
| 1410172 | 194965 | 194980 | N/A | N/A | CATTATCTCAGAAGGC | 36 | AG | 2212 |
| | 551688 | 551703 | | | | | | |
| 1410173 | 284901 | 284916 | N/A | N/A | AATCTTAGGCAAGCAG | 65 | AG | 2213 |
| 1410188 | 239900 | 239915 | N/A | N/A | ACACAGGATAGATGTA | 90 | AG | 2214 |
| 1410209 | 337573 | 337588 | N/A | N/A | AGTGATAAGCAATACC | 11 | AG | 2215 |
| 1410210 | 248743 | 248758 | N/A | N/A | CAATATTCATGCATGC | 71 | AG | 2216 |
| 1410255 | 229362 | 229377 | N/A | N/A | GTGTAAAACACCTTCA | 38 | AG | 2217 |
| 1410291 | 140033 | 140048 | N/A | N/A | CCAGTAAAGTCATTCT | 19 | AG | 2218 |
| 1410296 | 58074 | 58089 | N/A | N/A | TTGGATAGAAACATCA | 102 | AG | 2219 |
| 1410357 | 308262 | 308277 | N/A | N/A | TATATCTAGATGTCTG | 67 | AG | 2220 |
| 1410371 | 89933 | 89948 | N/A | N/A | GATATACAAGCCACAC | 31 | AG | 2221 |
| 1410442 | 435648 | 435663 | N/A | N/A | CCCAAGTTATGATTCT | 10 | AG | 2222 |
| 1410447 | 204003 | 204018 | N/A | N/A | GATACTAAGCTGTACT | 70 | AG | 2223 |
| 1410481 | 559394 | 559409 | 8383 | 8398 | GCTTTAAAGCATCACA | 97 | AG | 2224 |
| 1410502 | 273427 | 273442 | N/A | N/A | TTAAGTATACACAACC | 68 | AG | 2225 |
| 1410517 | 211591 | 211606 | N/A | N/A | TACAATCCCAATCCAT | 92 | AG | 2226 |
| 1410519 | 254956 | 254971 | N/A | N/A | GCCATTAAATTGGTTA | 92 | AG | 2227 |
| 1410525 | 188669 | 188684 | N/A | N/A | AACAGGTAAAGTGAGT | 31 | AG | 2228 |
| 1410532 | 398645 | 398660 | N/A | N/A | AGAACAAAGACGGCCT | 72 | AG | 2229 |
| 1410543 | 288566 | 288581 | N/A | N/A | GAAAATGCTATCACAC | 79 | AG | 2230 |
| 1411078 | 557268 | 557283 | 6257 | 6272 | GTAATTAAGTTTTGAT | 57 | AG | 2231 |
| 1411088 | 533706 | 533721 | 2945 | 2960 | GATATGAGCGGTGCTC | 58 | AG | 2232 |
| 1411100 | 559086 | 559101 | 8075 | 8090 | CTATATATACTCTCAA | 34 | AG | 2233 |
| 1411130 | 554555 | 554570 | 3544 | 3559 | AAACAACTGAGCAGAC | 41 | AG | 2234 |
| 1411135 | 559782 | 559797 | 8771 | 8786 | TACCTATTTACACTCT | 22 | AG | 2235 |
| 1411175 | 560461 | 560476 | 9450 | 9465 | ACTAACCACATGCATG | 42 | AG | 2236 |
| 1411182 | 556339 | 556354 | 5328 | 5343 | CTTTAGTTACTGAAGC | 25 | AG | 2237 |
| 1411299 | 217565 | 217580 | 531 | 546 | CCGGAAATGATTCTGG | 65 | AG | 2238 |
| 1411330 | 558465 | 558480 | 7454 | 7469 | GATCATGTAAGATGCT | 46 | AG | 2239 |
| 1411384 | 555539 | 555554 | 4528 | 4543 | AAGTTAATAGAACCAT | 71 | AG | 2240 |
| 1411394 | 489615 | 489630 | 2562 | 2577 | AAGTAAAGAACTGTTC | 88† | AG | 2241 |
| 1411428 | 562576 | 562591 | 11565 | 11580 | ACCATTTAAATGCAAT | 52 | AG | 2242 |
| 1411429 | 218026 | 218041 | 992 | 1007 | GAAATTCCACATGTTT | 9 | AG | 2243 |
| 1173082 | 533769 | 533784 | 3008 | 3023 | CCAGATAGTGGTCTTT | 70 | AH | 2244 |
| 1173403 | 288679 | 288694 | 2074 | 2089 | TCTATTGGAGAAGTGT | 6 | AH | 181 |
| 1408298 | 222144 | 222159 | 1554 | 1569 | CCTTCTTTAATGCGCT | 17 | AH | 2245 |
| 1408318 | 82201 | 82216 | N/A | N/A | AGATATTAGCTCATGG | 8 | AH | 2246 |
| 1408336 | 189830 | 189845 | N/A | N/A | AAATTATCGAACCATC | 58 | AH | 2247 |
| 1408528 | 288819 | 288834 | N/A | N/A | GGTAACTGAAGATACA | 55 | AH | 2248 |
| 1408549 | 288569 | 288584 | N/A | N/A | TTCGAAAATGCTATCA | 112 | AH | 2249 |
| 1408580 | 290557 | 290572 | N/A | N/A | ATACACTCAGAACCTA | 69 | AH | 2250 |
| 1408585 | 290739 | 290754 | N/A | N/A | GATAAGCCCGACATGT | 38 | AH | 2251 |
| 1408592 | 217571 | 217586 | 537 | 552 | AATGTTCCGGAAATGA | 9 | AH | 2252 |
| 1408610 | 188678 | 188693 | N/A | N/A | TTAATAGTCAACAGGT | 25 | AH | 2253 |
| 1408636 | 225043 | 225058 | N/A | N/A | ATTGAATGCATACACC | 10 | AH | 2254 |
| 1408658 | 235222 | 235237 | N/A | N/A | GTCATTAATATTATAC | 25 | AH | 2255 |
| | 235295 | 235310 | | | | | | |
| 1408696 | 263120 | 263135 | N/A | N/A | ATAATATAATTAGTAC | 98 | AH | 2256 |
| 1408735 | 271149 | 271164 | N/A | N/A | GATTGTTAGAGTAAAT | 82 | AH | 2257 |
| 1408835 | 218032 | 218047 | 998 | 1013 | CTCCTTGAAATTCCAC | 8 | AH | 2258 |
| 1409100 | 177457 | 177472 | N/A | N/A | ATCTTTAATTAGGTGA | 28 | AH | 2259 |
| 1409128 | 471053 | 471068 | N/A | N/A | CCAAAGATATCACGGA | 103 | AH | 2260 |
| 1409150 | 552536 | 552551 | N/A | N/A | AGTCAAAGGCCATTCT | 95 | AH | 2261 |
| 1409161 | 298307 | 298322 | N/A | N/A | CATGATTAAGATGTCA | 52 | AH | 2262 |
| 1409205 | 418880 | 418895 | N/A | N/A | ACACAATTATGATGGG | 46 | AH | 2263 |
| 1409213 | 341056 | 341071 | N/A | N/A | GTAGATATGGAGCTTT | 4 | AH | 2264 |
| 1409271 | 208709 | 208724 | N/A | N/A | AAGTAGTCATCTGTTT | 72 | AH | 2265 |
| 1409323 | 250092 | 250107 | N/A | N/A | AGCAATACTTTGTGGT | 25 | AH | 2266 |
| 1409350 | 266298 | 266313 | N/A | N/A | CCATTTAAAACTTGCC | 37 | AH | 2267 |
| 1409360 | 254972 | 254987 | N/A | N/A | TCAGATAGCTTTTTCA | 28 | AH | 2268 |
| 1409361 | 308264 | 308279 | N/A | N/A | CCTATATCTAGATGTC | 64 | AH | 2269 |
| 1409382 | 323357 | 323372 | N/A | N/A | GATTTACACTACTTTC | 42 | AH | 2270 |
| 1409531 | 244579 | 244594 | N/A | N/A | GACATAAGCAGGGTGG | 15 | AH | 2271 |
| 1409536 | 198252 | 198267 | N/A | N/A | AGTTATTTCAAGCTCA | 13 | AH | 2272 |
| 1409537 | 204004 | 204019 | N/A | N/A | AGATACTAAGCTGTAC | 82 | AH | 2273 |
| 1409624 | 215857 | 215872 | N/A | N/A | ACATTAGTTGTTACCA | 49 | AH | 2274 |
| 1409635 | 219966 | 219981 | N/A | N/A | GGGAATATAAACACTG | 88 | AH | 2275 |
| 1409670 | 206047 | 206062 | N/A | N/A | GTTAGTAAACACCTTA | 12 | AH | 2276 |
| 1409713 | 202269 | 202284 | N/A | N/A | CAAACCACTTCACAGT | 73 | AH | 2277 |
| 1409729 | 285149 | 285164 | 1784 | 1799 | AAATTTCAGTGCTCCC | 10 | AH | 2278 |
| 1409755 | 273445 | 273460 | N/A | N/A | TTTACTATGGTTGCAT | 45 | AH | 2279 |
| 1409808 | 239913 | 239928 | N/A | N/A | GACTAAAATGTCCACA | 89 | AH | 2280 |
| 1409840 | 278796 | 278811 | N/A | N/A | CTTATGAAACAGGCAA | 17 | AH | 2281 |
| 1409885 | 262953 | 262968 | N/A | N/A | AGTTAAGAGCAGCAGC | 72 | AH | 2282 |
| 1409888 | 363709 | 363724 | N/A | N/A | GTAATAAGCAGCCAGA | 13 | AH | 2283 |
| 1409975 | 448133 | 448148 | N/A | N/A | ACATTATACCACGAGG | 20 | AH | 2284 |
| 1409976 | 125506 | 125521 | N/A | N/A | ACTAATGCTTTACTCC | 23 | AH | 2285 |
| 1409984 | 233265 | 233280 | N/A | N/A | AGGAATTGAAGGCTCT | 9 | AH | 2286 |
| 1409995 | 106668 | 106683 | N/A | N/A | GCAATAAGGCTTCTGC | 93 | AH | 2287 |
| 1410027 | 211593 | 211608 | N/A | N/A | TTTACAATCCCAATCC | 74 | AH | 2288 |
| 1410032 | 398700 | 398715 | N/A | N/A | ATGTTTTAGACCAGAG | 7 | AH | 2289 |
| 1410082 | 181831 | 181846 | N/A | N/A | TCTATAAATTTGTGCC | 19 | AH | 2290 |
| 1410130 | 506084 | 506099 | N/A | N/A | ATCTTATATATGCACT | 35 | AH | 2291 |
| 1410162 | 387393 | 387408 | N/A | N/A | TAGCTATAGGTACTCT | 28 | AH | 2292 |
| 1410264 | 94387 | 94402 | N/A | N/A | AGGCTGCTATTAAAGA | 66 | AH | 2293 |
| 1410266 | 259182 | 259197 | N/A | N/A | CTAATCACAGACTGGA | 34 | AH | 2294 |
| 1410275 | 140037 | 140052 | N/A | N/A | ATTACCAGTAAAGTCA | 11 | AH | 2295 |
| 1410298 | 458504 | 458519 | N/A | N/A | ATGTATAAAGGACCTC | 16 | AH | 2296 |
| 1410311 | 192564 | 192579 | N/A | N/A | GTATATTTTGGAGTCC | 24 | AH | 2297 |
| 1410362 | 282171 | 282186 | N/A | N/A | ACATTACATGGCTGGG | 18 | AH | 2298 |
| 1410367 | 292254 | 292269 | N/A | N/A | GCTCTAAGAGATCTGC | 46 | AH | 2299 |
| 1410417 | 229417 | 229432 | N/A | N/A | AAGATTAAAGTACTGT | 71 | AH | 2300 |
| 1410435 | 226299 | 226314 | N/A | N/A | ACCTTACACAGAGTGA | 53 | AH | 2301 |
| 1410444 | 522311 | 522326 | N/A | N/A | TTTTTATAACTATGGC | 27 | AH | 2302 |
| 1410455 | 248744 | 248759 | N/A | N/A | CCAATATTCATGCATG | 24 | AH | 2303 |
| 1410490 | 435818 | 435833 | N/A | N/A | CTTAACTTTTGACTCC | 19 | AH | 2304 |
| 1410504 | 559087 | 559102 | 8076 | 8091 | ACTATATATACTCTCA | 16 | AH | 2305 |
| 1410528 | 186451 | 186466 | N/A | N/A | CAGGATACAAGAGCTG | 91 | AH | 2306 |
| 1410538 | 59655 | 59670 | N/A | N/A | ATGTACTATTGTATTA | 104 | AH | 2307 |
| 1410539 | 221828 | 221843 | N/A | N/A | GAAGATCTAACTCTTC | 102 | AH | 2308 |
| 1410585 | 155818 | 155833 | N/A | N/A | GTCAAAAATGTGTAGT | 5 | AH | 2309 |
| 1411120 | 556341 | 556356 | 5330 | 5345 | TTCTTTAGTTACTGAA | 83 | AH | 2310 |
| 1411167 | 555541 | 555556 | 4530 | 4545 | CAAAGTTAATAGAACC | 31 | AH | 2311 |
| 1411221 | 559413 | 559428 | 8402 | 8417 | ACAACAATAAAGAACG | 87 | AH | 2312 |
| 1411223 | 559783 | 559798 | 8772 | 8787 | TTACCTATTTACACTC | 34 | AH | 2313 |
| 1411250 | 557290 | 557305 | 6279 | 6294 | AAAGTAAGGACTCTGC | 20 | AH | 2314 |
| 1411267 | 561964 | 561979 | 10953 | 10968 | AGTTATTATAATAGGC | 22 | AH | 2315 |
| 1411318 | 554557 | 554572 | 3546 | 3561 | TAAAACAACTGAGCAG | 34 | AH | 2316 |
| 1411334 | 562655 | 562670 | 11644 | 11659 | TCTAAAGTTTGTACAT | 61 | AH | 2317 |
| 1411413 | 558603 | 558618 | 7592 | 7607 | ACAAAAGGAGAATGCC | 49 | AH | 2318 |
| 1411430 | 560462 | 560477 | 9451 | 9466 | GACTAACCACATGCAT | 65 | AH | 2319 |
| 1411438 | 489616 | 489631 | 2563 | 2578 | CAAGTAAAGAACTGTT | 65† | AH | 2320 |
| 1004291 | 458505 | 458520 | N/A | N/A | CATGTATAAAGGACCT | 61 | AI | 2321 |
| 1173403 | 288679 | 288694 | 2074 | 2089 | TCTATTGGAGAAGTGT | 4 | AI | 181 |
| 1408265 | 271176 | 271191 | N/A | N/A | ATTAGTGACAGTCAGA | 8 | AI | 2322 |
| 1408297 | 222145 | 222160 | 1555 | 1570 | ACCTTCTTTAATGCGC | 15 | AI | 2323 |
| 1408317 | 82202 | 82217 | N/A | N/A | CAGATATTAGCTCATG | 6 | AI | 2324 |
| 1408335 | 189831 | 189846 | N/A | N/A | AAAATTATCGAACCAT | 73 | AI | 2325 |
| 1408514 | 222012 | 222027 | 1422 | 1437 | AACTGGGAGCTGTACA | 11 | AI | 2326 |
| 1408553 | 288820 | 288835 | N/A | N/A | AGGTAACTGAAGATAC | 42 | AI | 2327 |
| 1408564 | 288570 | 288585 | N/A | N/A | TTTCGAAAATGCTATC | 90 | AI | 2328 |
| 1408579 | 290567 | 290582 | N/A | N/A | CACTAATAGGATACAC | 63 | AI | 2329 |
| 1408635 | 225063 | 225078 | N/A | N/A | CCTGGTAAATTTTCCT | 24 | AI | 2330 |
| 1408648 | 218033 | 218048 | 999 | 1014 | ACTCCTTGAAATTCCA | 6 | AI | 2331 |
| 1408657 | 235232 | 235247 | N/A | N/A | ATAGATTTAAGTCATT | 46 | AI | 2332 |
| | 235305 | 235320 | | | | | | |
| 1408712 | 263129 | 263144 | N/A | N/A | TTAAGTGCTATAATAT | 58 | AI | 2333 |
| 1409165 | 215871 | 215886 | N/A | N/A | CTTTATGAAAGAGGAC | 48 | AI | 2334 |
| 1409169 | 262954 | 262969 | N/A | N/A | CAGTTAAGAGCAGCAG | 43 | AI | 2335 |
| 1409223 | 140053 | 140068 | N/A | N/A | CTTAATACTCCTGTCA | 40 | AI | 2336 |
| 1409225 | 522566 | 522581 | N/A | N/A | CATATTTTAGTTGGAT | 22 | AI | 2337 |
| 1409267 | 177713 | 177728 | N/A | N/A | AGAGTATTAACTCCGA | 65 | AI | 2338 |
| 1409301 | 127240 | 127255 | N/A | N/A | GACTATATACTATGAG | 40 | AI | 2339 |
| 1409332 | 204006 | 204021 | N/A | N/A | TCAGATACTAAGCTGT | 96 | AI | 2340 |
| 1409337 | 60248 | 60263 | N/A | N/A | TTAAGTTTATACCCAA | 95 | AI | 2341 |
| 1409341 | 436648 | 436663 | N/A | N/A | CATATGAACAAGAGAG | 39 | AI | 2342 |
| 1409346 | 273446 | 273461 | N/A | N/A | GTTTACTATGGTTGCA | 51 | AI | 2343 |
| 1409347 | 285150 | 285165 | 1785 | 1800 | AAAATTTCAGTGCTCC | 7 | AI | 2344 |
| 1409397 | 255160 | 255175 | N/A | N/A | GGATATAAACCCAACG | 52 | AI | 2345 |
| 1409423 | 248745 | 248760 | N/A | N/A | GCCAATATTCATGCAT | 75 | AI | 2346 |
| 1409468 | 250919 | 250934 | N/A | N/A | GGAACTAAAGCTCCAA | 85 | AI | 2347 |
| 1409486 | 220171 | 220186 | N/A | N/A | ACCTATTAGCATGTTT | 77 | AI | 2348 |
| 1409520 | 193659 | 193674 | N/A | N/A | TATACCAAGTGGTAGG | 84 | AI | 2349 |
| 1409564 | 419083 | 419098 | N/A | N/A | GACAATTTGAATGTTG | 87 | AI | 2350 |
| 1409604 | 233266 | 233281 | N/A | N/A | AAGGAATTGAAGGCTC | 7 | AI | 2351 |
| 1409606 | 155819 | 155834 | N/A | N/A | AGTCAAAAATGTGTAG | 5 | AI | 2352 |
| 1409645 | 181832 | 181847 | N/A | N/A | ATCTATAAATTTGTGC | 54 | AI | 2353 |
| 1409667 | 202270 | 202285 | N/A | N/A | ACAAACCACTTCACAG | 71 | AI | 2354 |
| 1409682 | 471082 | 471097 | N/A | N/A | TGGAATACGCTTATCC | 78 | AI | 2355 |
| 1409691 | 400103 | 400118 | N/A | N/A | TTCTATAGATGACTCC | 59 | AI | 2356 |
| 1409694 | 198283 | 198298 | N/A | N/A | TCCATAAGCATTCCAA | 33 | AI | 2357 |
| 1409707 | 292389 | 292404 | N/A | N/A | CTTTATTGGTTGCTAC | 4 | AI | 2358 |
| 1409723 | 106669 | 106684 | N/A | N/A | AGCAATAAGGCTTCTG | 76 | AI | 2359 |
| 1409743 | 290742 | 290757 | N/A | N/A | AGAGATAAGCCCGACA | 22 | AI | 2360 |
| 1409762 | 299798 | 299813 | N/A | N/A | CTTAGATAAGGATTCC | 32 | AI | 2361 |
| 1409787 | 282172 | 282187 | N/A | N/A | AACATTACATGGCTGG | 15 | AI | 2362 |
| 1409794 | 278797 | 278812 | N/A | N/A | TCTTATGAAACAGGCA | 13 | AI | 2363 |
| 1409803 | 187088 | 187103 | N/A | N/A | GAGACTTAGATGAGGG | 18 | AI | 2364 |
| 1409858 | 552935 | 552950 | N/A | N/A | GTAATTTAGAAGTGCT | 30 | AI | 2365 |
| 1409863 | 363710 | 363725 | N/A | N/A | AGTAATAAGCAGCCAG | 10 | AI | 2366 |
| 1409902 | 211595 | 211610 | N/A | N/A | CCTTTACAATCCCAAT | 71 | AI | 2367 |
| 1409934 | 229419 | 229434 | N/A | N/A | ACAAGATTAAAGTACT | 69 | AI | 2368 |
| 1410020 | 450199 | 450214 | N/A | N/A | GATATACTTAGATGCT | 43 | AI | 2369 |
| 1410068 | 244751 | 244766 | N/A | N/A | TAAAGGGTATTGATCA | 25 | AI | 2370 |
| 1410117 | 508259 | 508274 | N/A | N/A | ATAATACTGGTCTTCT | 49 | AI | 2371 |
| 1410170 | 239914 | 239929 | N/A | N/A | AGACTAAAATGTCCAC | 99 | AI | 2372 |
| 1410174 | 324217 | 324232 | N/A | N/A | ACTACTAACATGTTTA | 59 | AI | 2373 |
| 1410204 | 308341 | 308356 | N/A | N/A | GACTTTTAACAGTTCG | 71 | AI | 2374 |
| 1410223 | 95121 | 95136 | N/A | N/A | GTAGAATTTACAGGAA | 3 | AI | 2375 |
| 1410224 | 206102 | 206117 | N/A | N/A | GATATTCATAAATGCA | 54 | AI | 2376 |
| 1410284 | 208710 | 208725 | N/A | N/A | TAAGTAGTCATCTGTT | 64 | AI | 2377 |
| 1410372 | 226332 | 226347 | N/A | N/A | CCAGATTTATTCCAGG | 16 | AI | 2378 |
| 1410375 | 266299 | 266314 | N/A | N/A | ACCATTTAAAACTTGC | 17 | AI | 2379 |
| 1410389 | 342566 | 342581 | N/A | N/A | CATAATAGATGGGCAA | 14 | AI | 2380 |
| 1410393 | 387789 | 387804 | N/A | N/A | ATGTTTAAGATCATCT | 33 | AI | 2381 |
| 1410420 | 259183 | 259198 | N/A | N/A | TCTAATCACAGACTGG | 39 | AI | 2382 |
| 1410441 | 188693 | 188708 | N/A | N/A | TCAAAACCTGTGTTGT | 84 | AI | 2383 |
| 1411097 | 559423 | 559438 | 8412 | 8427 | ACTAATTACAACAACA | 61 | AI | 2384 |
| 1411129 | 533771 | 533786 | 3010 | 3025 | CTCCAGATAGTGGTCT | 52 | AI | 2385 |
| 1411165 | 561965 | 561980 | 10954 | 10969 | CAGTTATTATAATAGG | 19 | AI | 2386 |
| 1411170 | 562678 | 562693 | 11667 | 11682 | GAAATTTGTTGGATTT | 77 | AI | 2387 |
| 1411219 | 559785 | 559800 | 8774 | 8789 | AGTTACCTATTTACAC | 68 | AI | 2388 |
| 1411243 | 559088 | 559103 | 8077 | 8092 | CACTATATATACTCTC | 14 | AI | 2389 |
| 1411304 | 560512 | 560527 | 9501 | 9516 | CTTATACACCTAAGGG | 80 | AI | 2390 |
| 1411313 | 557295 | 557310 | 6284 | 6299 | GCGATAAAGTAAGGAC | 14 | AI | 2391 |
| 1411347 | 558604 | 558619 | 7593 | 7608 | TACAAAAGGAGAATGC | 64 | AI | 2392 |
| 1411350 | 555558 | 555573 | 4547 | 4562 | GAACAAGCTCATGACT | 53 | AI | 2393 |
| 1411365 | 217607 | 217622 | 573 | 588 | GAAACAGCATCTTGGT | 4 | AI | 2394 |
| 1411368 | 554644 | 554659 | 3633 | 3648 | AAACTACAGTTTGTCC | 17 | AI | 2395 |
| 1411390 | 489617 | 489632 | 2564 | 2579 | GCAAGTAAAGAACTGT | 27† | AI | 2396 |
| 1411442 | 556413 | 556428 | 5402 | 5417 | CATACAGACATTCTAT | 24 | AI | 2397 |
| 1173403 | 288679 | 288694 | 2074 | 2089 | TCTATTGGAGAAGTGT | 5 | AJ | 181 |
| 1408264 | 271177 | 271192 | N/A | N/A | TATTAGTGACAGTCAG | 10 | AJ | 2398 |
| 1408316 | 82203 | 82218 | N/A | N/A | TCAGATATTAGCTCAT | 5 | AJ | 2399 |
| 1408348 | 225070 | 225085 | N/A | N/A | TTATTGACCTGGTAAA | 59 | AJ | 2400 |
| 1408552 | 288830 | 288845 | N/A | N/A | AGTTATCACTAGGTAA | 34 | AJ | 2401 |
| 1408563 | 288610 | 288625 | N/A | N/A | GAAATACCTACAAGAG | 77 | AJ | 2402 |
| 1408567 | 290747 | 290762 | N/A | N/A | AAAGCAGAGATAAGCC | 59 | AJ | 2403 |
| 1408576 | 217611 | 217626 | 577 | 592 | ACTAGAAACAGCATCT | 18 | AJ | 2404 |
| 1408589 | 290569 | 290584 | N/A | N/A | ATCACTAATAGGATAC | 88 | AJ | 2405 |
| 1408621 | 189868 | 189883 | N/A | N/A | CTGTTATCTTGACATT | 66 | AJ | 2406 |
| 1408644 | 218043 | 218058 | 1009 | 1024 | CAGTATTTCCACTCCT | 5 | AJ | 2407 |
| 1408656 | 235242 | 235257 | N/A | N/A | AGACAACAAAATAGAT | 51 | AJ | 2408 |
| | 235315 | 235330 | | | | | | |
| 1408695 | 263130 | 263145 | N/A | N/A | CTTAAGTGCTATAATA | 67 | AJ | 2409 |
| 1408723 | 262969 | 262984 | N/A | N/A | CCAATATTAATGTCAC | 5 | AJ | 2410 |
| 1409090 | 282174 | 282189 | N/A | N/A | TTAACATTACATGGCT | 60 | AJ | 2411 |
| 1409139 | 436649 | 436664 | N/A | N/A | GCATATGAACAAGAGA | 9 | AJ | 2412 |
| 1409188 | 198284 | 198299 | N/A | N/A | CTCCATAAGCATTCCA | 40 | AJ | 2413 |
| 1409189 | 229498 | 229513 | N/A | N/A | GCAATAAAGCTAAGTG | 10 | AJ | 2414 |
| 1409202 | 193661 | 193676 | N/A | N/A | TATATACCAAGTGGTA | 91 | AJ | 2415 |
| 1409218 | 188937 | 188952 | N/A | N/A | GTATATAAGTTTTGAT | 73 | AJ | 2416 |
| 1409231 | 240021 | 240036 | N/A | N/A | ACAGATTTAACTCTTC | 16 | AJ | 2417 |
| 1409236 | 299998 | 300013 | N/A | N/A | ACTGATTAAAGCTACC | 47 | AJ | 2418 |
| 1409319 | 522567 | 522582 | N/A | N/A | TCATATTTTAGTTGGA | 19 | AJ | 2419 |
| 1409335 | 108190 | 108205 | N/A | N/A | AATACTGACAATCATC | 78 | AJ | 2420 |
| 1409338 | 208711 | 208726 | N/A | N/A | TTAAGTAGTCATCTGT | 38 | AJ | 2421 |
| 1409340 | 387855 | 387870 | N/A | N/A | CCAATAACTTGTCCAT | 6 | AJ | 2422 |
| 1409407 | 220173 | 220188 | N/A | N/A | ATACCTATTAGCATGT | 84 | AJ | 2423 |
| 1409566 | 400224 | 400239 | N/A | N/A | TTCAAGAGGCTAGTGC | 21 | AJ | 2424 |
| 1409644 | 278798 | 278813 | N/A | N/A | GTCTTATGAAACAGGC | 45 | AJ | 2425 |
| 1409663 | 226628 | 226643 | N/A | N/A | CTAATTTTGGAGCCAT | 43 | AJ | 2426 |
| 1409697 | 308470 | 308485 | N/A | N/A | TTGTATAGACTTTTCC | 20 | AJ | 2427 |
| 1409701 | 273496 | 273511 | N/A | N/A | GTGTATATAGGAACAA | 33 | AJ | 2428 |
| 1409720 | 471322 | 471337 | N/A | N/A | ACCTTAAGGTTTTTGC | 64 | AJ | 2429 |
| 1409798 | 458514 | 458529 | N/A | N/A | GCTAATAACCATGTAT | 42 | AJ | 2430 |
| 1409811 | 127336 | 127351 | N/A | N/A | AAGTTTAAATACCTCC | 64 | AJ | 2431 |
| 1409844 | 552936 | 552951 | N/A | N/A | AGTAATTTAGAAGTGC | 30 | AJ | 2432 |
| 1409849 | 419949 | 419964 | N/A | N/A | GATAATTCTGTCACTT | 32 | AJ | 2433 |
| 1409853 | 364532 | 364547 | N/A | N/A | CATTATACTTCCTTCA | 21 | AJ | 2434 |
| 1409855 | 508260 | 508275 | N/A | N/A | CATAATACTGGTCTTC | 40 | AJ | 2435 |
| 1409869 | 248788 | 248803 | N/A | N/A | GCTTAGCAGACTGCTG | 61 | AJ | 2436 |
| 1409912 | 202275 | 202290 | N/A | N/A | ACAATACAAACCACTT | 63 | AJ | 2437 |
| 1409968 | 267518 | 267533 | N/A | N/A | AATACTCCACCTGGTG | 76 | AJ | 2438 |
| 1410127 | 60915 | 60930 | N/A | N/A | GTAATATTGAGATCAA | 16 | AJ | 2439 |
| 1410147 | 206180 | 206195 | N/A | N/A | GTTCATCGGATTTTCA | 47 | AJ | 2440 |
| 1410151 | 187203 | 187218 | N/A | N/A | AGCAATAACTGTGGGT | 24 | AJ | 2441 |
| 1410163 | 181869 | 181884 | N/A | N/A | AACCAGATGTAGTTTC | 32 | AJ | 2442 |
| 1410168 | 204011 | 204026 | N/A | N/A | GCTATTCAGATACTAA | 49 | AJ | 2443 |
| 1410202 | 255321 | 255336 | N/A | N/A | GCTGAACTAAGTGGCA | 92 | AJ | 2444 |
| 1410216 | 180689 | 180704 | N/A | N/A | CCATTAACACCACTGT | 71 | AJ | 2445 |
| 1410319 | 215892 | 215907 | N/A | N/A | AATACAGTGTACTCAC | 55 | AJ | 2446 |
| 1410321 | 244760 | 244775 | N/A | N/A | TTTATGAGTTAAAGGG | 20 | AJ | 2447 |
| 1410331 | 259386 | 259401 | N/A | N/A | CAATCAATCACTTTCA | 22 | AJ | 2448 |
| 1410356 | 233288 | 233303 | N/A | N/A | ATCATTAAACCTCCTC | 32 | AJ | 2449 |
| 1410366 | 95490 | 95505 | N/A | N/A | GCATATACACCTGTGC | 91 | AJ | 2450 |
| 1410414 | 141624 | 141639 | N/A | N/A | GATTTAAGTCGGGTCA | 95 | AJ | 2451 |
| 1410419 | 155847 | 155862 | N/A | N/A | GTTATTAAATAATCCC | 6 | AJ | 2452 |
| 1410469 | 292551 | 292566 | N/A | N/A | AAGAAGCAGGATGCTT | 86 | AJ | 2453 |
| 1410474 | 450538 | 450553 | N/A | N/A | TTTAATTCAGTCCCCA | 62 | AJ | 2454 |
| 1410534 | 342700 | 342715 | N/A | N/A | GATATTACAAACAAGG | 12 | AJ | 2455 |
| 1410573 | 251701 | 251716 | N/A | N/A | ATTACCTAAAGGTCAG | 38 | AJ | 2456 |
| 1410579 | 211617 | 211632 | N/A | N/A | GTGGATAAAAGCTTTA | 67 | AJ | 2457 |
| 1411075 | 559089 | 559104 | 8078 | 8093 | CCACTATATATACTCT | 17 | AJ | 2458 |
| 1411084 | 557367 | 557382 | 6356 | 6371 | TTAATTAGACACTGCT | 20 | AJ | 2459 |
| 1411159 | 559424 | 559439 | 8413 | 8428 | GACTAATTACAACAAC | 56 | AJ | 2460 |
| 1411196 | 558605 | 558620 | 7594 | 7609 | GTACAAAAGGAGAATG | 83 | AJ | 2461 |
| 1411205 | 556414 | 556429 | 5403 | 5418 | ACATACAGACATTCTA | 16 | AJ | 2462 |
| 1411263 | 533773 | 533788 | 3012 | 3027 | AACTCCAGATAGTGGT | 84 | AJ | 2463 |
| 1411269 | 560513 | 560528 | 9502 | 9517 | CCTTATACACCTAAGG | 91 | AJ | 2464 |
| 1411286 | 285151 | 285166 | 1786 | 1801 | CAAAATTTCAGTGCTC | 8 | AJ | 2465 |
| 1411332 | 554645 | 554660 | 3634 | 3649 | AAAACTACAGTTTGTC | 72 | AJ | 2466 |
| 1411352 | 555809 | 555824 | 4798 | 4813 | TCATAGTACCTTCAAC | 32 | AJ | 2467 |
| 1411373 | 562681 | 562696 | 11670 | 11685 | ATTGAAATTTGTTGGA | 87 | AJ | 2468 |
| 1411377 | 559823 | 559838 | 8812 | 8827 | ATATACCAAACATGCT | 43 | AJ | 2469 |
| 1411396 | 489618 | 489633 | 2565 | 2580 | TGCAAGTAAAGAACTG | 44† | AJ | 2470 |
| 1411398 | 222016 | 222031 | 1426 | 1441 | TTCAAACTGGGAGCTG | 6 | AJ | 2471 |
| 1411402 | 222157 | 222172 | 1567 | 1582 | CAAGAACTGACCACCT | 7 | AJ | 2472 |
| 1411423 | N/A | N/A | 2179 | 2194 | TCCAATATTGTGGCCA | 22 | AJ | 2473 |
| 1411434 | 562017 | 562032 | 11006 | 11021 | GTAAAGAAATGTTCCA | 16 | AJ | 2474 |
| 1410423 | 285254 | 285269 | 1889 | 1904 | ATCTTTTGAATCTGTC | 4 | AK | 686 |
| 1410423 | 285254 | 285269 | 1889 | 1904 | ATCTTTTGAATCTGTC | 3 | AL | 686 |
| 1410423 | 285254 | 285269 | 1889 | 1904 | ATCTTTTGAATCTGTC | 3 | AM | 686 |
| 1410423 | 285254 | 285269 | 1889 | 1904 | ATCTTTTGAATCTGTC | 3 | AN | 686 |
| 1410423 | 285254 | 285269 | 1889 | 1904 | ATCTTTTGAATCTGTC | 2 | AO | 686 |
| 1410423 | 285254 | 285269 | 1889 | 1904 | ATCTTTTGAATCTGTC | 3 | AP | 686 |
| 1410423 | 285254 | 285269 | 1889 | 1904 | ATCTTTTGAATCTGTC | 4 | AQ | 686 |
| 1441240 | 366243 | 366258 | N/A | N/A | ACTATCATATGAAAGC | 13 | AQ | 2475 |
| 1441241 | 366242 | 366257 | N/A | N/A | CTATCATATGAAAGCC | 4 | AQ | 2476 |
| 1441242 | 366241 | 366256 | N/A | N/A | TATCATATGAAAGCCA | 5 | AQ | 2477 |
| 1441243 | 181932 | 181947 | N/A | N/A | ATGCAGAATTGATAAC | 51 | AQ | 2478 |
| 1441244 | 365701 | 365716 | N/A | N/A | GCAGTAATATTAAAGC | 28 | AQ | 2479 |
| 1441245 | 365700 | 365715 | N/A | N/A | CAGTAATATTAAAGCC | 10 | AQ | 2480 |
| 1441246 | 508287 | 508302 | N/A | N/A | TTTTAAGAGTCCACTA | 63 | AQ | 2481 |
| 1441247 | 508286 | 508301 | N/A | N/A | TTTAAGAGTCCACTAG | 80 | AQ | 2482 |
| 1441248 | 222040 | 222055 | 1450 | 1465 | TAAAGAAGTGTTGTCC | 4 | AQ | 2483 |
| 1441249 | 155903 | 155918 | N/A | N/A | AAGTTATTATATGGCT | 17 | AQ | 2484 |
| 1441250 | 155901 | 155916 | N/A | N/A | GTTATTATATGGCTGT | 5 | AQ | 2485 |
| 1441251 | 251926 | 251941 | N/A | N/A | GGTTTTAAGTTATCTC | 3 | AQ | 2486 |
| 1441252 | N/A | N/A | 2003 | 2018 | AATACCTGAGTGACTG | 4 | AQ | 2487 |
| 1441253 | 285468 | 285483 | 2002 | 2017 | ATACCTGAGTGACTGA | 4 | AQ | 2488 |
| 1441318 | 235205 | 235220 | N/A | N/A | CAATTTAGCTCTATTA | 39 | AQ | 2489 |
| 1441551 | 222154 | 222169 | 1564 | 1579 | GAACTGACCACCTTCT | 12 | AQ | 2490 |
| 1441552 | 222149 | 222164 | 1559 | 1574 | GACCACCTTCTTTAAT | 35 | AQ | 2491 |
| 1441553 | 244768 | 244783 | N/A | N/A | ATAGGTAATTTATGAG | 19 | AQ | 2492 |
| 1441554 | 342929 | 342944 | N/A | N/A | TGAGATAATGTGAAGC | 3 | AQ | 2493 |
| 1441555 | 342928 | 342943 | N/A | N/A | GAGATAATGTGAAGCT | 3 | AQ | 2494 |
| 1441556 | 342925 | 342940 | N/A | N/A | ATAATGTGAAGCTTAG | 5 | AQ | 2495 |
| 1441557 | 218086 | 218101 | 1052 | 1067 | AATCTATAGGATGCTG | 6 | AQ | 2496 |
| 1441558 | 229904 | 229919 | N/A | N/A | ACATTTAGAGGCATTG | 9 | AQ | 2497 |
| 1441559 | 229902 | 229917 | N/A | N/A | ATTTAGAGGCATTGCA | 20 | AQ | 2498 |
| 1441560 | 222047 | 222062 | 1457 | 1472 | TGTAGTATAAAGAAGT | 12 | AQ | 2499 |
| 1441561 | 97753 | 97768 | N/A | N/A | TCTCATTAAATCAAGG | 21 | AQ | 2500 |
| 1441562 | 97751 | 97766 | N/A | N/A | TCATTAAATCAAGGCA | 8 | AQ | 2501 |
| 1441563 | 350508 | 350523 | N/A | N/A | TTATTATAGGGTTGAA | 6 | AQ | 2502 |
| 1441564 | 350507 | 350522 | N/A | N/A | TATTATAGGGTTGAAA | 66 | AQ | 2503 |
| 1441565 | 290653 | 290668 | 2132 | 2147 | AGGTAAGGCAATGGAC | 5 | AQ | 2504 |
| 1441566 | 290652 | 290667 | 2131 | 2146 | GGTAAGGCAATGGACT | 22 | AQ | 2505 |
| 1441567 | 82465 | 82480 | N/A | N/A | TGAACAATGCTGATTC | 56 | AQ | 2506 |
| 1441568 | 82462 | 82477 | N/A | N/A | ACAATGCTGATTCAGG | 4 | AQ | 2507 |
| 1441569 | 368430 | 368445 | N/A | N/A | GGTGATATTGTATAAG | 4 | AQ | 2508 |
| 1441570 | 368428 | 368443 | N/A | N/A | TGATATTGTATAAGGT | 7 | AQ | 2509 |
| 1441571 | 368425 | 368440 | N/A | N/A | TATTGTATAAGGTTAG | 10 | AQ | 2510 |
| 1441572 | 368424 | 368439 | N/A | N/A | ATTGTATAAGGTTAGG | 3 | AQ | 2511 |
| 1441573 | 242390 | 242405 | N/A | N/A | CGTCAAGTAATGAGTT | 7 | AQ | 2512 |
| 1441574 | 285255 | 285270 | 1890 | 1905 | GATCTTTTGAATCTGT | 10 | AQ | 2513 |
| 1441575 | 285253 | 285268 | 1888 | 1903 | TCTTTTGAATCTGTCC | 6 | AQ | 2514 |
| 1441576 | 285188 | 285203 | 1823 | 1838 | TGGTACCATTACTGAG | 37 | AQ | 2515 |
| 1441577 | 217792 | 217807 | 758 | 773 | CTCCAGTTAACAGCGC | 19 | AQ | 2516 |
| 1441578 | 217788 | 217803 | 754 | 769 | AGTTAACAGCGCGGTG | 12 | AQ | 2517 |
| 1441579 | 217787 | 217802 | 753 | 768 | GTTAACAGCGCGGTGA | 23 | AQ | 2518 |
| 1441580 | 217786 | 217801 | 752 | 767 | TTAACAGCGCGGTGAG | 14 | AQ | 2519 |
| 1441700 | 222231 | 222246 | 1641 | 1656 | GAATAGCCCATCACGA | 20 | AQ | 2520 |
| 1441702 | 222230 | 222245 | 1640 | 1655 | AATAGCCCATCACGAT | 12 | AQ | 2521 |
| 1441714 | 218175 | 218190 | 1141 | 1156 | ACACAAACCAGCTGAT | 10 | AQ | 2522 |
| 1441718 | 218174 | 218189 | 1140 | 1155 | CACAAACCAGCTGATG | 8 | AQ | 2523 |
| 1441722 | 218173 | 218188 | 1139 | 1154 | ACAAACCAGCTGATGA | 8 | AQ | 2524 |
| 1441737 | 218170 | 218185 | 1136 | 1151 | AACCAGCTGATGAGAT | 7 | AQ | 2525 |
| 1441853 | 263335 | 263350 | N/A | N/A | GTTTGAAGAATGCATG | 8 | AQ | 2526 |
| 1441854 | 344746 | 344761 | N/A | N/A | CTAAATTTAGTATCCT | 10 | AQ | 2527 |
| 1441855 | 391184 | 391199 | N/A | N/A | AATTAGGATTAAGGAG | 37 | AQ | 2528 |
| 1441856 | 391183 | 391198 | N/A | N/A | ATTAGGATTAAGGAGT | 10 | AQ | 2529 |
| 1441857 | 391182 | 391197 | N/A | N/A | TTAGGATTAAGGAGTT | 4 | AQ | 2530 |
| 1441858 | 391180 | 391195 | N/A | N/A | AGGATTAAGGAGTTCT | 36 | AQ | 2531 |
| 1441859 | 391179 | 391194 | N/A | N/A | GGATTAAGGAGTTCTG | 11 | AQ | 2532 |
| 1441860 | 391178 | 391193 | N/A | N/A | GATTAAGGAGTTCTGT | 14 | AQ | 2533 |
| 1441861 | 222013 | 222028 | 1423 | 1438 | AAACTGGGAGCTGTAC | 8 | AQ | 2534 |
| 1441977 | 229160 | 229175 | N/A | N/A | AGTATTAACCACCATT | 5 | AQ | 2535 |
| 1441978 | 463907 | 463922 | N/A | N/A | AGATTTAATAGGTCTT | 73 | AQ | 2536 |
| 1441979 | 331864 | 331879 | N/A | N/A | CTATAGTATGATAGCA | 31 | AQ | 2537 |
| 1441980 | 331861 | 331876 | N/A | N/A | TAGTATGATAGCACAA | 4 | AQ | 2538 |
| 1441981 | 331860 | 331875 | N/A | N/A | AGTATGATAGCACAAA | 3 | AQ | 2539 |
| 1441982 | 331859 | 331874 | N/A | N/A | GTATGATAGCACAAAC | 5 | AQ | 2540 |
| 1441983 | 236803 | 236818 | N/A | N/A | AATTGTTATACTGATG | 24 | AQ | 2541 |
| 1441984 | 236802 | 236817 | N/A | N/A | ATTGTTATACTGATGG | 5 | AQ | 2542 |
| 1441985 | 236801 | 236816 | N/A | N/A | TTGTTATACTGATGGG | 5 | AQ | 2543 |
| 1441986 | 236799 | 236814 | N/A | N/A | GTTATACTGATGGGCT | 8 | AQ | 2544 |
| 1441987 | 236798 | 236813 | N/A | N/A | TTATACTGATGGGCTA | 6 | AQ | 2545 |
| 1441988 | 236797 | 236812 | N/A | N/A | TATACTGATGGGCTAG | 34 | AQ | 2546 |
| 1441989 | 217510 | 217525 | 476 | 491 | GCTGTAAACTTTGTTC | 13 | AQ | 2547 |
| 1441990 | 222017 | 222032 | 1427 | 1442 | TTTCAAACTGGGAGCT | 14 | AQ | 2548 |
| 1442015 | 226037 | 226052 | N/A | N/A | CCCAACCTCTTGCACC | 41 | AQ | 2549 |
| 1442048 | 508284 | 508299 | N/A | N/A | TAAGAGTCCACTAGCC | 71 | AQ | 2550 |
| 1442085 | 222237 | 222252 | 1647 | 1662 | CCACTAGAATAGCCCA | 4 | AQ | 2551 |
| 1410423 | 285254 | 285269 | 1889 | 1904 | ATCTTTTGAATCTGTC | 3 | AR | 686 |
| 1410423 | 285254 | 285269 | 1889 | 1904 | ATCTTTTGAATCTGTC | 5 | AS | 686 |
| 1410423 | 285254 | 285269 | 1889 | 1904 | ATCTTTTGAATCTGTC | 4 | AT | 686 |
| 1410423 | 285254 | 285269 | 1889 | 1904 | ATCTTTTGAATCTGTC | 3 | AU | 686 |
| 1410423 | 285254 | 285269 | 1889 | 1904 | ATCTTTTGAATCTGTC | 4 | AV | 686 |
| 1442123 | 326723 | 326738 | N/A | N/A | GATTATGAGGAAACCT | 4 | AV | 2552 |
| 1442124 | 263003 | 263018 | N/A | N/A | ATGAATGGTATGATGG | 6 | AV | 2553 |
| 1442125 | 263333 | 263348 | N/A | N/A | TTGAAGAATGCATGTC | 3 | AV | 2554 |
| 1442126 | 391186 | 391201 | N/A | N/A | TTAATTAGGATTAAGG | 31 | AV | 2555 |
| 1442127 | 391176 | 391191 | N/A | N/A | TTAAGGAGTTCTGTGT | 3 | AV | 2556 |
| 1442128 | 229900 | 229915 | N/A | N/A | TTAGAGGCATTGCAGG | 6 | AV | 2557 |
| 1442129 | 350504 | 350519 | N/A | N/A | TATAGGGTTGAAAATA | 38 | AV | 2558 |
| 1442130 | 368422 | 368437 | N/A | N/A | TGTATAAGGTTAGGTG | 3 | AV | 2559 |
| 1442131 | 222238 | 222253 | 1648 | 1663 | GCCACTAGAATAGCCC | 28 | AV | 2560 |
| 1442152 | 229158 | 229173 | N/A | N/A | TATTAACCACCATTCC | 6 | AV | 2561 |
| 1442153 | 236795 | 236810 | N/A | N/A | TACTGATGGGCTAGCC | 60 | AV | 2562 |
| 1442154 | 217567 | 217582 | 533 | 548 | TTCCGGAAATGATTCT | 11 | AV | 2563 |
| 1442155 | 222021 | 222036 | 1431 | 1446 | ATGGTTTCAAACTGGG | 4 | AV | 2564 |

[0472] The modified oligonucleotides in Table 3 below are 16 nucleosides in length. The sugar motif for the modified oligonucleotides is (from 5′ to 3′): kkkdyddddddddkkk; wherein each “d” represents a 2′-β-D-deoxyribosyl sugar moiety, each “k” represents a cEt modified sugar moiety, and each “y” represents a 2′-O-methylribosyl sugar moiety. The internucleoside linkage motif for the modified oligonucleotides is (from 5′ to 3′): sssssssssssssss; wherein each “s” represents a phosphorothioate internucleoside linkage. Each cytosine residue is a 5-methylcytosine unless otherwise indicated. Non-methylated cytosines are represented in bold underlined italicized font as “C”.

TABLE 3
Reduction of PSD3 RNA by mixed sugar modified oligonucleotides with uniform phosphorothioate
internucleoside linkages

| | SEQ | SEQ | SEQ | SEQ | | | | |
|---|---|---|---|---|---|---|---|---|
| | ID | ID | ID | ID | | | | |
| | NO: 1 | NO: 1 | NO: 2 | NO: 2 | | DMPK | | SEQ |
| Compound | Start | Stop | Start | Stop | | (% UTC) | | ID |
| No. | Site | Site | Site | Site | Sequence (5′ to 3′) | RTS41435 | AID | NO |
| 1408272 | 217983 | 217998 | 949 | 964 | GCTT [symbol] GATCACATCCC | 25 | E | 22 |
| 1408278 | 218080 | 218095 | 1046 | 1061 | TAGGATGCTGGGTCTC | 10 | E | 474 |
| 1408280 | 222145 | 222160 | 1555 | 1570 | ACCTUCTTTAATGCGC | 28 | E | 2565 |
| 1408294 | 225074 | 225089 | N/A | N/A | TGTAUTATTGACCTGG | 12 | E | 2566 |
| 1408299 | 249397 | 249412 | N/A | N/A | GGTAUTATTAGTATGT | 8 | E | 2567 |
| 1408367 | 271174 | 271189 | N/A | N/A | TAGTGACAGTCAGAAC | 91 | E | 378 |
| 1408400 | 217666 | 217681 | 632 | 647 | TCTGUGTTTTACGACT | 10 | E | 2568 |
| 1408402 | 217988 | 218003 | 954 | 969 | GAGCUGCTTCGATCAC | 35 | E | 2569 |
| 1408408 | 290684 | 290699 | 2163 | 2178 | TGTAGATCGGTATTAA | 42 | E | 354 |
| 1408410 | 181277 | 181292 | N/A | N/A | ATCTUCTATTTAATGG | 76 | E | 2570 |
| 1408417 | 189818 | 189833 | N/A | N/A | CATCUTTTGCTGGCAT | 51 | E | 2571 |
| 1408421 | 189758 | 189773 | N/A | N/A | TTGT [symbol] ATACACTAACC | 78 | E | 2572 |
| 1408424 | 225203 | 225218 | N/A | N/A | AGTG [symbol] TTGGCTGAAGG | 28 | E | 2573 |
| 1408428 | 225153 | 225168 | N/A | N/A | TCGG [symbol] AGAGGGATGTT | 64 | E | 2574 |
| 1408431 | 225033 | 225048 | N/A | N/A | TACA [symbol] CACCACCGACA | 79 | E | 2575 |
| 1408435 | 224933 | 224948 | N/A | N/A | GAGAGAAATCCGATCA | 79 | E | 2576 |
| 1408439 | 226012 | 226027 | N/A | N/A | AAGAGCAATTCAGCCG | 101 | E | 2577 |
| 1408443 | 225882 | 225897 | N/A | N/A | CTAGGCAATAGCAAAG | 81 | E | 2578 |
| 1408448 | 225802 | 225817 | N/A | N/A | CACTUGGTCCAGTTCA | 30 | E | 2579 |
| 1408452 | 225762 | 225777 | N/A | N/A | TCTGGAGGCTGACTGC | 47 | E | 2580 |
| 1408457 | 235402 | 235417 | N/A | N/A | ATAG [symbol] ACTAAAGTTTT | 29 | E | 2581 |
| 1408464 | 235202 | 235217 | N/A | N/A | TTTAGCTCTATTAAAT | 90 | E | 2582 |
| 1408466 | 235349 | 235364 | N/A | N/A | ACACACAGCCTGGTCC | 56 | E | 2583 |
| 1408468 | 235269 | 235284 | N/A | N/A | TCTGUTAAATTCACAC | 62 | E | 2584 |
| 1408474 | 235059 | 235074 | N/A | N/A | CCAGGCAACACACACA | 52 | E | 2585 |
| 1408478 | 243424 | 243439 | N/A | N/A | GTCA [symbol] GGACTGCTGAC | 80 | E | 2586 |
| 1408482 | 243334 | 243349 | N/A | N/A | CCTGGACTTAGTGCTG | 56 | E | 2587 |
| 1408486 | 243284 | 243299 | N/A | N/A | AAGTUGCAGGATGCAC | 83 | E | 2588 |
| 1408491 | 243204 | 243219 | N/A | N/A | GGGT [symbol] TTGCTCATGAA | 70 | E | 2589 |
| 1408494 | 249534 | 249549 | N/A | N/A | ATTTGTCCCCACTGTC | 67 | E | 2590 |
| 1408502 | 249324 | 249339 | N/A | N/A | GCCAGTGGCAGAGCTG | 66 | E | 2591 |
| 1408506 | 249254 | 249269 | N/A | N/A | TCCTGCCTCTCTGGGA | 79 | E | 2592 |
| 1408508 | 263180 | 263195 | N/A | N/A | GCCAGAGGCAGTGTAC | 66 | E | 2593 |
| 1408511 | 263140 | 263155 | N/A | N/A | AGTCCTGGGCCTTAAG | 68 | E | 2594 |
| 1408513 | 263000 | 263015 | N/A | N/A | AATGGTATGATGGTTC | 49 | E | 2595 |
| 1408522 | 262959 | 262974 | N/A | N/A | TGTCACAGTTAAGAGC | 76 | E | 2596 |
| 1408525 | 262899 | 262914 | N/A | N/A | CCAAGCATGCATCCAC | 30 | E | 2597 |
| 1408532 | 271229 | 271244 | N/A | N/A | TGCAUTTTCTGGCTTT | 68 | E | 2598 |
| 1408539 | 271079 | 271094 | N/A | N/A | AGTCATCCCTGCCAGG | 54 | E | 2599 |
| 1408742 | 217791 | 217806 | 757 | 772 | TCCAGTTAACAGCGCG | 26 | E | 2600 |
| 1408747 | 217741 | 217756 | 707 | 722 | CCTCCGTTGTTACTTC | 9 | E | 2601 |
| 1408752 | 217651 | 217666 | 617 | 632 | TGGCAGTGTCCAGCTC | 26 | E | 2602 |
| 1408756 | 217591 | 217606 | 557 | 572 | CCAGUACCTTTGTAGC | 63 | E | 2603 |
| 1408761 | 217521 | 217536 | 487 | 502 | AGAGUCAATGGGCTGT | 31 | E | 2604 |
| 1408764 | 218123 | 218138 | 1089 | 1104 | CTGT [symbol] AGGAGAGGCTG | 35 | E | 2605 |
| 1408767 | 218103 | 218118 | 1069 | 1084 | TTGCAGTGATGTCTCA | 13 | E | 2606 |
| 1408773 | 218013 | 218028 | 979 | 994 | TTTGACCCGGCCTGGG | 71 | E | 2607 |
| 1408776 | 217973 | 217988 | 939 | 954 | CATC [symbol] CCCTGGGTGCT | 45 | E | 2608 |
| 1408778 | 217943 | 217958 | 909 | 924 | GACCUCTGCTCTTTCA | 72 | E | 2609 |
| 1408783 | 217893 | 217908 | 859 | 874 | TGCTGAGCTCCCGAGG | 62 | E | 2610 |
| 1408787 | 217843 | 217858 | 809 | 824 | CAGC [symbol] CCTTTCCTCCC | 34 | E | 2611 |
| 1408795 | 218072 | 218087 | 1038 | 1053 | TGGGUCTCTCTCTTGT | 55 | E | 2612 |
| 1408797 | 218052 | 218067 | 1018 | 1033 | TCCTGTCCACAGTATT | 18 | E | 2613 |
| 1408808 | 222222 | 222237 | 1632 | 1647 | ATCA [symbol] GATGCCACCAT | 18 | E | 180 |
| 1408812 | 222182 | 222197 | 1592 | 1607 | GATGUCCTCCCCCTGA | 33 | E | 2614 |
| 1408816 | 222082 | 222097 | 1492 | 1507 | AGGCUCTGAGTATAAT | 28 | E | 2615 |
| 1408820 | 221992 | 222007 | 1402 | 1417 | GGTGGAGTCCTCCGTA | 52 | E | 2616 |
| 1408823 | 288729 | 288744 | N/A | N/A | TGTAUCAGATTACCTT | 62 | E | 2617 |
| 1408825 | 288699 | 288714 | 2094 | 2109 | TCTGGGTTACAATAAA | 69 | E | 2618 |
| 1408826 | 288639 | 288654 | 2034 | 2049 | GTTT [symbol] TCCCACAAGAG | 42 | E | 2619 |
| 1408828 | 288559 | 288574 | N/A | N/A | CTAT [symbol] ACACTCTTTCA | 86 | E | 2620 |
| 1408837 | 290807 | 290822 | N/A | N/A | CATGGGAACCATGTAG | 92 | E | 2621 |
| 1408848 | 290659 | 290674 | 2138 | 2153 | TTGCACAGGTAAGGCA | 112 | E | 2622 |
| 1408850 | 290599 | 290614 | N/A | N/A | TCGCUTTTCACTGTTG | 79 | E | 2623 |
| 1408853 | 290559 | 290574 | N/A | N/A | GGATACACTCAGAACC | 75 | E | 2624 |
| 1408857 | 82330 | 82345 | N/A | N/A | CTAGGTCAGTGGACAA | 88 | E | 2625 |
| 1408861 | 82230 | 82245 | N/A | N/A | TGTA [symbol] TTCAGACTCTG | 48 | E | 2626 |
| 1408865 | 82170 | 82185 | N/A | N/A | TTTT [symbol] TTCAAGGGAGA | 23 | E | 2627 |
| 1408866 | 181422 | 181437 | N/A | N/A | CCCTGACTTCCCGTTC | 72 | E | 2628 |
| 1408871 | 181362 | 181377 | N/A | N/A | TCTGUCTCTGTGCAGG | 81 | E | 2629 |
| 1408878 | 181142 | 181157 | N/A | N/A | TATTUCCTGCCCTCCC | 60 | E | 2630 |
| 1408881 | 188688 | 188703 | N/A | N/A | ACCTGTGTTGTTAATA | 62 | E | 2631 |
| 1408885 | 188628 | 188643 | N/A | N/A | TCATGTTTTTTCATCC | 42 | E | 2632 |
| 1408887 | 188538 | 188553 | N/A | N/A | CACA [symbol] TCTTGTTATTT | 67 | E | 2633 |
| 1408893 | 189928 | 189943 | N/A | N/A | TGATUTTCTTAATGGT | 70 | E | 2634 |
| 1408897 | 189888 | 189903 | N/A | N/A | TTGG [symbol] TGTCTGCTGCT | 67 | E | 2635 |
| 1408271 | 217984 | 217999 | 950 | 965 | TGCTUCGATCACATCC | 22 | F | 2636 |
| 1408275 | 217980 | 217995 | 946 | 961 | TCGAUCACATCCCCCT | 68 | F | 2637 |
| 1408277 | 218081 | 218096 | 1047 | 1062 | ATAGGATGCTGGGTCT | 11 | F | 551 |
| 1408289 | 188559 | 188574 | N/A | N/A | GGTAUTATTGATAGGC | 40 | F | 2638 |
| 1408291 | 225076 | 225091 | N/A | N/A | TGTGUATTATTGACCT | 7 | F | 2639 |
| 1408401 | 217656 | 217671 | 622 | 637 | ACGA [symbol] TGGCAGTGTCC | 35 | F | 358 |
| 1408404 | 222147 | 222162 | 1557 | 1572 | CCAC [symbol] TTCTTTAATGC | 19 | F | 347 |
| 1408416 | 189848 | 189863 | N/A | N/A | AAGG [symbol] AAATCTCTTTC | 91 | F | 2640 |
| 1408420 | 189768 | 189783 | N/A | N/A | TTGCUTTAAGTTGTCA | 32 | F | 2641 |
| 1408423 | 225213 | 225228 | N/A | N/A | TTGGGCCCTCAGTGCT | 79 | F | 2642 |
| 1408427 | 225163 | 225178 | N/A | N/A | CTTC [symbol] TTGCCTCGGCA | 91 | F | 2643 |
| 1408430 | 225053 | 225068 | N/A | N/A | TTTC [symbol] TTCAAATTGAA | 84 | F | 2644 |
| 1408434 | 224943 | 224958 | N/A | N/A | CACAUGGCATGAGAGA | 38 | F | 2645 |
| 1408438 | 226022 | 226037 | N/A | N/A | CTTT [symbol] TTTAAAAGAGC | 107 | F | 2646 |
| 1408442 | 225952 | 225967 | N/A | N/A | ACCG [symbol] CACTGAAATAA | 37 | F | 2647 |
| 1408447 | 225832 | 225847 | N/A | N/A | CTTGUTCTAGATCTAC | 26 | F | 2648 |
| 1408451 | 225772 | 225787 | N/A | N/A | GAGCACGGGCTCTGGA | 108 | F | 2649 |
| 1408456 | 235412 | 235427 | N/A | N/A | ATTTGGTTTAATAGCA | 12 | F | 2650 |
| 1408459 | 235352 | 235367 | N/A | N/A | AGCA [symbol] ACACAGCCTGG | 34 | F | 2651 |
| 1408461 | 235272 | 235287 | N/A | N/A | AGCT [symbol] TGTTAAATTCA | 14 | F | 2652 |
| 1408463 | 235252 | 235267 | N/A | N/A | TGACUGAAATAGACAA | 48 | F | 2653 |
| | 235325 | 235340 | | | | | | |
| 1408473 | 235099 | 235114 | N/A | N/A | CCTGUTGGTTGTCCAA | 15 | F | 2654 |
| 1408477 | 243434 | 243449 | N/A | N/A | GGCAGAGAGGGTCACG | 30 | F | 2655 |
| 1408481 | 243344 | 243359 | N/A | N/A | CTTGUGGTAACCTGGA | 58 | F | 2656 |
| 1408485 | 243294 | 243309 | N/A | N/A | GCCTGGATAGAAGTTG | 53 | F | 2657 |
| 1408490 | 243224 | 243239 | N/A | N/A | CACTUGCCACATCTCT | 18 | F | 2658 |
| 1408493 | 249544 | 249559 | N/A | N/A | ATGAGCTTTCATTTGT | 60 | F | 2659 |
| 1408497 | 249464 | 249479 | N/A | N/A | TTCCAGGTTGGTCTAA | 18 | F | 2660 |
| 1408500 | 249344 | 249359 | N/A | N/A | GGTTUCCCATAACACG | 96 | F | 2661 |
| 1408505 | 249294 | 249309 | N/A | N/A | GCAGUCTGACTTTAGA | 37 | F | 2662 |
| 1408516 | 262960 | 262975 | N/A | N/A | ATGT [symbol] ACAGTTAAGAG | 71 | F | 2663 |
| 1408518 | 263149 | 263164 | N/A | N/A | TGTA [symbol] TGTAAGTCCTG | 24 | F | 2664 |
| 1408520 | 263059 | 263074 | N/A | N/A | TCACACCAAAGTGATA | 83 | F | 2665 |
| 1408524 | 262919 | 262934 | N/A | N/A | TCTCUCACTGATATCA | 71 | F | 2666 |
| 1408530 | 271249 | 271264 | N/A | N/A | TCAGUTGGGAAGAAAA | 88 | F | 2667 |
| 1408535 | 271199 | 271214 | N/A | N/A | GGCCUTTACATTTATA | 76 | F | 2668 |
| 1408538 | 271119 | 271134 | N/A | N/A | CCTTGGACTGATAAAT | 109 | F | 2669 |
| 1408542 | 271029 | 271044 | N/A | N/A | CTGC [symbol] TGTTACATCAG | 73 | F | 2670 |
| 1408741 | 217801 | 217816 | 767 | 782 | CCTGAGTGTCTCCAGT | 36 | F | 2671 |
| 1408746 | 217761 | 217776 | 727 | 742 | GATG [symbol] TCAAATAAAAA | 64 | F | 2672 |
| 1408751 | 217671 | 217686 | 637 | 652 | GACT [symbol] TCTGTGTTTTA | 10 | F | 2673 |
| 1408755 | 217601 | 217616 | 567 | 582 | GCAT [symbol] TTGGTCCAGTA | 32 | F | 2674 |
| 1408760 | 217541 | 217556 | 507 | 522 | GCTTUCAGAGCTGAAA | 58 | F | 2675 |
| 1408769 | 218073 | 218088 | 1039 | 1054 | CTGGGTCTCTCTCTTG | 50 | F | 2676 |
| 1408771 | 218053 | 218068 | 1019 | 1034 | CTCCUGTCCACAGTAT | 60 | F | 2677 |
| 1408782 | 217903 | 217918 | 869 | 884 | GGCAGGTCACTGCTGA | 84 | F | 2678 |
| 1408786 | 217853 | 217868 | 819 | 834 | TGCA [symbol] ACAGACAGCCC | 57 | F | 2679 |
| 1408790 | 218132 | 218147 | 1098 | 1113 | GACT [symbol] TTTGCTGTCAG | 37 | F | 2680 |
| 1408793 | 218112 | 218127 | 1078 | 1093 | GGCTGTTCTTTGCAGT | 77 | F | 2681 |
| 1408799 | 218022 | 218037 | 988 | 1003 | TTCCACATGTTTGACC | 37 | F | 2682 |
| 1408801 | 217992 | 218007 | 958 | 973 | CATGGAGCTGCTTCGA | 35 | F | 2683 |
| 1408803 | 217962 | 217977 | 928 | 943 | GTGCUCTCTCCCAAGA | 71 | F | 2684 |
| 1408807 | 222252 | 222267 | 1662 | 1677 | AGCC [symbol] ATTGGTGACGC | 39 | F | 2685 |
| 1408811 | 222192 | 222207 | 1602 | 1617 | AGGAUATCCTGATGTC | 69 | F | 2686 |
| 1408815 | 222132 | 222147 | 1542 | 1557 | CGCTGTTGTATCATTG | 17 | F | 2687 |
| 1408819 | 222022 | 222037 | 1432 | 1447 | AATGGTTTCAAACTGG | 10 | F | 2688 |
| 1408822 | 288829 | 288844 | N/A | N/A | GTTAUCACTAGGTAAC | 89 | F | 2689 |
| 1408830 | 288700 | 288715 | 2095 | 2110 | ATCTGGGTTACAATAA | 46 | F | 2690 |
| 1408831 | 288640 | 288655 | 2035 | 2050 | AGTTUCTCCCACAAGA | 52 | F | 2691 |
| 1408833 | 288560 | 288575 | N/A | N/A | GCTAUCACACTCTTTC | 66 | F | 2692 |
| 1408839 | 290607 | 290622 | N/A | N/A | GCATGAATTCGCTTTT | 100 | F | 2693 |
| 1408843 | 290809 | 290824 | N/A | N/A | GCCAUGGGAACCATGT | 95 | F | 2694 |
| 1408846 | 290689 | 290704 | 2168 | 2183 | GGCCATGTAGATCGGT | 64 | F | 2695 |
| 1408847 | 290669 | 290684 | 2148 | 2163 | AGAAGCATTATTGCAC | 72 | F | 2696 |
| 1408852 | 290579 | 290594 | N/A | N/A | CCAC [symbol] TTATTATCACT | 75 | F | 2697 |
| 1408856 | 82340 | 82355 | N/A | N/A | TGAGGTTTGCCTAGGT | 33 | F | 2698 |
| 1408860 | 82290 | 82305 | N/A | N/A | TCAG [symbol] ACGAGGTAAGC | 19 | F | 2699 |
| 1408864 | 82190 | 82205 | N/A | N/A | CATGGAAAGCAATGGT | 40 | F | 2700 |
| 1408869 | 181382 | 181397 | N/A | N/A | TGTCUCCTTATGAAAG | 124 | F | 2701 |
| 1408874 | 181332 | 181347 | N/A | N/A | ACAAGTCATCTGTTCA | 27 | F | 2702 |
| 1408877 | 181232 | 181247 | N/A | N/A | AGTT [symbol] ATTATCTCCTT | 46 | F | 2703 |
| 1408880 | 188698 | 188713 | N/A | N/A | GCAGGTCAAAACCTGT | 83 | F | 2704 |
| 1408884 | 188638 | 188653 | N/A | N/A | TAGAGCTGGGTCATGT | 68 | F | 2705 |
| 1408890 | 188428 | 188443 | N/A | N/A | GGTTUTCTGTAGCCTA | 81 | F | 2706 |
| 1408892 | 189938 | 189953 | N/A | N/A | TTCTUCTCAATGATTT | 107 | F | 2707 |
| 1408896 | 189898 | 189913 | N/A | N/A | CTACUGCTTCTTGGCT | 88 | F | 2708 |
| 1411023 | 94389 | 94404 | N/A | N/A | TCAGGCTGCTATTAAA | 66 | F | 388 |
| 1408267 | 217663 | 217678 | 629 | 644 | GTGTUTTACGACTGGC | 9 | G | 2709 |
| 1408270 | 217985 | 218000 | 951 | 966 | CTGCUTCGATCACATC | 22 | G | 2710 |
| 1408274 | 217981 | 217996 | 947 | 962 | TTCGATCACATCCCCC | 29 | G | 1936 |
| 1408287 | 290681 | 290696 | 2160 | 2175 | AGAT [symbol] GGTATTAAGAA | 63 | G | 182 |
| 1408288 | 188561 | 188576 | N/A | N/A | AGGGUATTATTGATAG | 65 | G | 2711 |
| 1408403 | 218077 | 218092 | 1043 | 1058 | GATG [symbol] TGGGTCTCTCT | 26 | G | 381 |
| 1408406 | 222137 | 222152 | 1547 | 1562 | TAATGCGCTGTTGTAT | 16 | G | 348 |
| 1408407 | 288674 | 288689 | 2069 | 2084 | TGGAGAAGTGTATTAA | 4 | G | 350 |
| 1408409 | 82195 | 82210 | N/A | N/A | TAGCUCATGGAAAGCA | 67 | G | 2712 |
| 1408412 | 225078 | 225093 | N/A | N/A | CGTGUGTATTATTGAC | 12 | G | 2713 |
| 1408413 | 225068 | 225083 | N/A | N/A | ATTGACCTGGTAAATT | 85 | G | 364 |
| 1408419 | 189778 | 189793 | N/A | N/A | CACCUTCCTTTTGCTT | 78 | G | 2714 |
| 1408426 | 225173 | 225188 | N/A | N/A | TCAAUGTCCACTTCCT | 31 | G | 2715 |
| 1408433 | 224963 | 224978 | N/A | N/A | CAGA [symbol] TTCCGGCTTTA | 46 | G | 2716 |
| 1408437 | 226032 | 226047 | N/A | N/A | CCTCUTGCACCTTTCT | 6 | G | 2717 |
| 1408441 | 225962 | 225977 | N/A | N/A | ACTGUCCAATACCGCC | 8 | G | 2718 |
| 1408445 | 225842 | 225857 | N/A | N/A | GATAUCTGGTCTTGTT | 53 | G | 2719 |
| 1408450 | 225782 | 225797 | N/A | N/A | AGCT [symbol] AGTAAGAGCAC | 97 | G | 2720 |
| 1408454 | 225742 | 225757 | N/A | N/A | GTTCGAGGGCTGAGTA | 25 | G | 2721 |
| 1408455 | 235422 | 235437 | N/A | N/A | TTTG [symbol] CACTGATTTGG | 43 | G | 2722 |
| 1408465 | 235359 | 235374 | N/A | N/A | TTCCUACAGCACACAC | 22 | G | 2723 |
| 1408467 | 235339 | 235354 | N/A | N/A | TGGT [symbol] CTAAAGAAATG | 66 | G | 2724 |
| 1408469 | 235259 | 235274 | N/A | N/A | TCACACTTGACTGAAA | 33 | G | 2725 |
| 1408471 | 235189 | 235204 | N/A | N/A | AATT [symbol] ACACTTAATCT | 74 | G | 2726 |
| 1408475 | 243444 | 243459 | N/A | N/A | TTGTATTCCTGGCAGA | 56 | G | 2727 |
| 1408480 | 243384 | 243399 | N/A | N/A | TCAGUACACTGACCAA | 27 | G | 2728 |
| 1408484 | 243304 | 243319 | N/A | N/A | GACGGCCTCTGCCTGG | 87 | G | 2729 |
| 1408489 | 243234 | 243249 | N/A | N/A | CCTTUGCCCTCACTTG | 77 | G | 2730 |
| 1408496 | 249474 | 249489 | N/A | N/A | ACTT [symbol] CGATATTCCAG | 22 | G | 2731 |
| 1408499 | 249354 | 249369 | N/A | N/A | ACAGGTGCTAGGTTTC | 12 | G | 2732 |
| 1408504 | 249304 | 249319 | N/A | N/A | GTGTATCCAGGCAGTC | 45 | G | 2733 |
| 1408510 | 263150 | 263165 | N/A | N/A | ATGTACTGTAAGTCCT | 11 | G | 2734 |
| 1408512 | 263060 | 263075 | N/A | N/A | CTCA [symbol] ACCAAAGTGAT | 88 | G | 2735 |
| 1408517 | 262920 | 262935 | N/A | N/A | TTCT [symbol] TCACTGATATC | 42 | G | 2736 |
| 1408521 | 262989 | 263004 | N/A | N/A | GGTT [symbol] TGACATTGTTT | 8 | G | 2737 |
| 1408527 | 262879 | 262894 | N/A | N/A | CCTG [symbol] CGGGCACCATA | 80 | G | 2738 |
| 1408529 | 271309 | 271324 | N/A | N/A | CTCCATACCCCCCCCA | 92 | G | 2739 |
| 1408534 | 271209 | 271224 | N/A | N/A | AATGUGACAAGGCCTT | 53 | G | 2740 |
| 1408537 | 271159 | 271174 | N/A | N/A | CCTC [symbol] TAACAGATTGT | 87 | G | 2741 |
| 1408541 | 271039 | 271054 | N/A | N/A | CAGGGCATGTCTGCCT | 103 | G | 2742 |
| 1408740 | 217811 | 217826 | 777 | 792 | GAAAUCTCTGCCTGAG | 47 | G | 2743 |
| 1408745 | 217771 | 217786 | 737 | 752 | GATCUTTCTGGATGCT | 23 | G | 2744 |
| 1408749 | 217701 | 217716 | 667 | 682 | ATTTUTTTGGCCAGCA | 22 | G | 2745 |
| 1408754 | 217631 | 217646 | 597 | 612 | TCCA [symbol] CTGCTGAACTG | 12 | G | 2746 |
| 1408759 | 217551 | 217566 | 517 | 532 | GGCTUCTGTGGCTTTC | 11 | G | 2747 |
| 1408763 | 218133 | 218148 | 1099 | 1114 | AGACUCTTTGCTGTCA | 38 | G | 2748 |
| 1408765 | 218113 | 218128 | 1079 | 1094 | AGGCUGTTCTTTGCAG | 60 | G | 2749 |
| 1408768 | 218093 | 218108 | 1059 | 1074 | GTCT [symbol] AAAATCTATAG | 40 | G | 2750 |
| 1408772 | 218023 | 218038 | 989 | 1004 | ATTC [symbol] ACATGTTTGAC | 22 | G | 2751 |
| 1408775 | 217993 | 218008 | 959 | 974 | CCATGGAGCTGCTTCG | 49 | G | 2752 |
| 1408777 | 217963 | 217978 | 929 | 944 | GGTG [symbol] TCTCTCCCAAG | 64 | G | 2753 |
| 1408779 | 217913 | 217928 | 879 | 894 | CCTG [symbol] AGAGTGGCAGG | 72 | G | 2754 |
| 1408785 | 217863 | 217878 | 829 | 844 | AGATGGCTCCTGCACA | 52 | G | 2755 |
| 1408796 | 218062 | 218077 | 1028 | 1043 | TCTTGTCTCCTCCTGT | 16 | G | 2756 |
| 1408806 | 222262 | 222277 | 1672 | 1687 | GGCAUCATTCAGCCCA | 57 | G | 2757 |
| 1408810 | 222202 | 222217 | 1612 | 1627 | AGACACACTCAGGATA | 40 | G | 2758 |
| 1408814 | 222152 | 222167 | 1562 | 1577 | ACTGACCACCTTCTTT | 10 | G | 2759 |
| 1408818 | 222052 | 222067 | 1462 | 1477 | TGCA [symbol] TGTAGTATAAA | 23 | G | 2760 |
| 1408824 | 288719 | 288734 | N/A | N/A | TACCUTGTGAAGCAAT | 88 | G | 2761 |
| 1408827 | 288579 | 288594 | N/A | N/A | CAGTGAAATTTTCGAA | 98 | G | 2762 |
| 1408836 | 290817 | 290832 | N/A | N/A | ATTCACCTGCCATGGG | 65 | G | 2763 |
| 1408838 | 290647 | 290662 | 2126 | 2141 | GGCAATGGACTCCATC | 16 | G | 2764 |
| 1408840 | 290587 | 290602 | N/A | N/A | GTTGGACTCCACCTTA | 74 | G | 2765 |
| 1408845 | 290729 | 290744 | N/A | N/A | ACATGTTTTGGATCTA | 59 | G | 2766 |
| 1408854 | 290529 | 290544 | N/A | N/A | TGTG [symbol] TAGGTACAATT | 89 | G | 2767 |
| 1408855 | 82350 | 82365 | N/A | N/A | ACGAUCCAAGTGAGGT | 19 | G | 2768 |
| 1408859 | 82300 | 82315 | N/A | N/A | TACA [symbol] TGAGCTCAGCA | 8 | G | 2769 |
| 1408868 | 181402 | 181417 | N/A | N/A | CCTGATCATCTCAAAC | 96 | G | 2770 |
| 1408873 | 181342 | 181357 | N/A | N/A | TCAG [symbol] ATGAAACAAGT | 38 | G | 2771 |
| 1408876 | 181242 | 181257 | N/A | N/A | CTTG [symbol] TTGTAAGTTCA | 9 | G | 2772 |
| 1408879 | 188708 | 188723 | N/A | N/A | GTGGACCTGTGCAGGT | 68 | G | 2773 |
| 1408883 | 188648 | 188663 | N/A | N/A | GTAGGCAGCATAGAGC | 64 | G | 2774 |
| 1408889 | 188438 | 188453 | N/A | N/A | GCAGUTTGGTGGTTTT | 45 | G | 2775 |
| 1408891 | 189958 | 189973 | N/A | N/A | ACCTGCCAGGCAGATA | 74 | G | 2776 |
| 1408895 | 189908 | 189923 | N/A | N/A | GGGAACTTGTCTACTG | 78 | G | 2777 |
| 1408899 | 189858 | 189873 | N/A | N/A | GACAUTTTTTAAGGCA | 43 | G | 2778 |
| 1411022 | 94390 | 94405 | N/A | N/A | CTCAGGCTGCTATTAA | 52 | G | 395 |
| 1408266 | 217664 | 217679 | 630 | 645 | TGTGUTTTACGACTGG | 7 | H | 2779 |
| 1408269 | 217986 | 218001 | 952 | 967 | GCTG [symbol] TTCGATCACAT | 40 | H | 2093 |
| 1408273 | 217982 | 217997 | 948 | 963 | CTTCGATCACATCCCC | 20 | H | 256 |
| 1408279 | 218079 | 218094 | 1045 | 1060 | AGGAUGCTGGGTCTCT | 20 | H | 2780 |
| 1408281 | 222144 | 222159 | 1554 | 1569 | CCTT [symbol] TTTAATGCGCT | 26 | H | 2245 |
| 1408284 | 288676 | 288691 | 2071 | 2086 | ATTGGAGAAGTGTATT | 13 | H | 783 |
| 1408285 | 290682 | 290697 | 2161 | 2176 | TAGAUCGGTATTAAGA | 75 | H | 2781 |
| 1408295 | 225070 | 225085 | N/A | N/A | TTATUGACCTGGTAAA | 90 | H | 2782 |
| 1408418 | 189798 | 189813 | N/A | N/A | TTCT [symbol] CAAGTTTAGAT | 89 | H | 2783 |
| 1408422 | 189688 | 189703 | N/A | N/A | CCTG [symbol] ATCCACATAAC | 68 | H | 2784 |
| 1408425 | 225193 | 225208 | N/A | N/A | TGAAGGACAGGCTTAA | 58 | H | 2785 |
| 1408429 | 225113 | 225128 | N/A | N/A | GCCAGCTCACTGATTG | 79 | H | 2786 |
| 1408432 | 224973 | 224988 | N/A | N/A | CAGA [symbol] CATCTCAGACT | 72 | H | 2787 |
| 1408436 | 226042 | 226057 | N/A | N/A | GCCTUCCCAACCTCTT | 43 | H | 2788 |
| 1408440 | 225992 | 226007 | N/A | N/A | CAGTGTCATCCTGTGC | 51 | H | 2789 |
| 1408444 | 225852 | 225867 | N/A | N/A | TTTTGTTGAAGATATC | 18 | H | 2790 |
| 1408449 | 225792 | 225807 | N/A | N/A | AGTT [symbol] AGCATAGCTCA | 6 | H | 2791 |
| 1408453 | 225752 | 225767 | N/A | N/A | GACTGCCTGTGTTCGA | 28 | H | 2792 |
| 1408458 | 235362 | 235377 | N/A | N/A | AATTUCCTACAGCACA | 36 | H | 2793 |
| 1408460 | 235342 | 235357 | N/A | N/A | GCCTGGTCCTAAAGAA | 88 | H | 2794 |
| 1408462 | 235262 | 235277 | N/A | N/A | AATT [symbol] ACACTTGACTG | 38 | H | 2795 |
| 1408470 | 235199 | 235214 | N/A | N/A | AGCT [symbol] TATTAAATTCA | 36 | H | 2796 |
| 1408479 | 243414 | 243429 | N/A | N/A | GCTGACAAATGATCAA | 78 | H | 2797 |
| 1408483 | 243324 | 243339 | N/A | N/A | GTGCUGTGCAGAAATT | 26 | H | 2798 |
| 1408487 | 243244 | 243259 | N/A | N/A | GTCT [symbol] AACTCCCTTTG | 74 | H | 2799 |
| 1408492 | 243164 | 243179 | N/A | N/A | GTTGGTGCTGGAAAAA | 20 | H | 2800 |
| 1408495 | 249524 | 249539 | N/A | N/A | ACTGUCATTCAAAGCA | 62 | H | 2801 |
| 1408498 | 249384 | 249399 | N/A | N/A | TGTC [symbol] ACCTGGCAGAT | 89 | H | 2802 |
| 1408503 | 249314 | 249329 | N/A | N/A | GAGCUGGAATGTGTAT | 45 | H | 2803 |
| 1408507 | 249244 | 249259 | N/A | N/A | CTGGGAGAGGTCTGTC | 63 | H | 2804 |
| 1408509 | 263170 | 263185 | N/A | N/A | GTGTACTTTCTACCTT | 32 | H | 2805 |
| 1408515 | 262990 | 263005 | N/A | N/A | TGGTUCTGACATTGTT | 15 | H | 2806 |
| 1408519 | 263139 | 263154 | N/A | N/A | GTCCUGGGCCTTAAGT | 86 | H | 2807 |
| 1408523 | 262949 | 262964 | N/A | N/A | AAGAGCAGCAGCTTAA | 80 | H | 2808 |
| 1408526 | 262889 | 262904 | N/A | N/A | ATCCACACCTCCTGCC | 76 | H | 2809 |
| 1408533 | 271219 | 271234 | N/A | N/A | GGCTUTCTAAAATGTG | 91 | H | 2810 |
| 1408536 | 271169 | 271184 | N/A | N/A | ACAGUCAGAACCTCCT | 51 | H | 2811 |
| 1408540 | 271069 | 271084 | N/A | N/A | GCCAGGGCTCACAGGT | 93 | H | 2812 |
| 1408743 | 217781 | 217796 | 747 | 762 | AGCG [symbol] GGTGAGATCTT | 20 | H | 99 |
| 1408748 | 217731 | 217746 | 697 | 712 | TACTUCAGCTGAAAGA | 54 | H | 2813 |
| 1408753 | 217641 | 217656 | 607 | 622 | CAGCUCTTTTTCCACC | 17 | H | 2814 |
| 1408757 | 217581 | 217596 | 547 | 562 | TGTAGCCTGTAATGTT | 6 | H | 2815 |
| 1408762 | 217511 | 217526 | 477 | 492 | GGCTGTAAACTTTGTT | 66 | H | 2816 |
| 1408770 | 218063 | 218078 | 1029 | 1044 | CTCTUGTCTCCTCCTG | 16 | H | 2817 |
| 1408784 | 217883 | 217898 | 849 | 864 | CCGAGGGAGGCCAAAG | 67 | H | 2818 |
| 1408788 | 217833 | 217848 | 799 | 814 | CCTC [symbol] CATTATTCATT | 52 | H | 2819 |
| 1408789 | 218222 | 218237 | 1188 | 1203 | GCTTUCCAGGATTCAT | 12 | H | 2820 |
| 1408791 | 218122 | 218137 | 1088 | 1103 | TGTCAGGAGAGGCTGT | 25 | H | 2821 |
| 1408794 | 218102 | 218117 | 1068 | 1083 | TGCAGTGATGTCTCAA | 11 | H | 2822 |
| 1408798 | 218042 | 218057 | 1008 | 1023 | AGTAUTTCCACTCCTT | 16 | H | 2823 |
| 1408800 | 218012 | 218027 | 978 | 993 | TTGA [symbol] CCGGCCTGGGC | 69 | H | 2824 |
| 1408802 | 217972 | 217987 | 938 | 953 | ATCC [symbol] CCTGGGTGCTC | 48 | H | 2825 |
| 1408804 | 217942 | 217957 | 908 | 923 | ACCT [symbol] TGCTCTTTCAA | 41 | H | 2826 |
| 1408805 | 222272 | 222287 | 1682 | 1697 | TGGAGTCGCTGGCATC | 8 | H | 2827 |
| 1408809 | 222212 | 222227 | 1622 | 1637 | CACCATCTGCAGACAC | 12 | H | 2828 |
| 1408813 | 222172 | 222187 | 1582 | 1597 | CCCTGATGTCCTCTCC | 5 | H | 2829 |
| 1408817 | 222062 | 222077 | 1472 | 1487 | CCAGGGACTCTGCACT | 46 | H | 2830 |
| 1408829 | 288720 | 288735 | N/A | N/A | TTAC [symbol] TTGTGAAGCAA | 116 | H | 2831 |
| 1408832 | 288580 | 288595 | N/A | N/A | ACAGUGAAATTTTCGA | 84 | H | 2832 |
| 1408834 | 288550 | 288565 | N/A | N/A | TCTTUCATAGTTAAAA | 89 | H | 2833 |
| 1408841 | 290537 | 290552 | N/A | N/A | AACAGTACTGTGCTAG | 99 | H | 2834 |
| 1408842 | 290819 | 290834 | N/A | N/A | TTATUCACCTGCCATG | 87 | H | 2835 |
| 1408844 | 290759 | 290774 | N/A | N/A | TGTTUGAACATAAAAG | 95 | H | 2836 |
| 1408849 | 290649 | 290664 | 2128 | 2143 | AAGG [symbol] AATGGACTCCA | 14 | H | 2837 |
| 1408851 | 290589 | 290604 | N/A | N/A | CTGTUGGACTCCACCT | 91 | H | 2838 |
| 1408858 | 82310 | 82325 | N/A | N/A | TTTTGGAGTGTACACT | 12 | H | 2839 |
| 1408862 | 82220 | 82235 | N/A | N/A | ACTCUGCCTTGATACT | 32 | H | 2840 |
| 1408867 | 181412 | 181427 | N/A | N/A | CCGTUCTGATCCTGAT | 57 | H | 2841 |
| 1408872 | 181352 | 181367 | N/A | N/A | TGCAGGATCTTCAGCA | 83 | H | 2842 |
| 1408875 | 181252 | 181267 | N/A | N/A | TGAAUGTTGTCTTGCT | 40 | H | 2843 |
| 1408882 | 188658 | 188673 | N/A | N/A | TGAGUTTCTTGTAGGC | 40 | H | 2844 |
| 1408886 | 188618 | 188633 | N/A | N/A | TCAT [symbol] CATTTAGCCAG | 25 | H | 2845 |
| 1408888 | 188508 | 188523 | N/A | N/A | TGAAGTTGTTTGTATA | 79 | H | 2846 |
| 1408894 | 189918 | 189933 | N/A | N/A | AATGGTGTCTGGGAAC | 33 | H | 2847 |
| 1408898 | 189878 | 189893 | N/A | N/A | GCTG [symbol] TTCTCCTGTTA | 82 | H | 2848 |
| 1411021 | 94387 | 94402 | N/A | N/A | AGGCUGCTATTAAAGA | 83 | H | 2849 |
| 1411025 | 94392 | 94407 | N/A | N/A | TTCT [symbol] AGGCTGCTATT | 74 | H | 390 |
| 1411020 | 94382 | 94397 | N/A | N/A | GCTAUTAAAGACATGC | 85 | I | 2850 |
| 1411024 | 94386 | 94401 | N/A | N/A | GGCTGCTATTAAAGAC | 87 | I | 393 |
| 1411026 | 88243 | 88258 | N/A | N/A | CTCAGAGAAGGAAGGT | 57 | I | 2048 |
| 1411027 | 88244 | 88259 | N/A | N/A | GCTCAGAGAAGGAAGG | 74 | I | 392 |
| 1411028 | 88241 | 88256 | N/A | N/A | CAGAGAAGGAAGGTAT | 69 | I | 389 |
| 1411029 | 88242 | 88257 | N/A | N/A | TCAGAGAAGGAAGGTA | 61 | I | 382 |
| 1411030 | 88248 | 88263 | N/A | N/A | CCGGGCTCAGAGAAGG | 92 | I | 394 |
| 1411031 | 88240 | 88255 | N/A | N/A | AGAGAAGGAAGGTATT | 56 | I | 391 |
| 1411032 | 88246 | 88261 | N/A | N/A | GGGCUCAGAGAAGGAA | 103 | I | 2851 |
| 1411033 | 88238 | 88253 | N/A | N/A | AGAAGGAAGGTATTCA | 88 | I | 385 |
| 1411034 | 88245 | 88260 | N/A | N/A | GGCT [symbol] AGAGAAGGAAG | 78 | I | 384 |
| 1441462 | 288682 | 288697 | 2077 | 2092 | ATAT [symbol] TATTGGAGAAG | 10 | AR | 1091 |
| 1441465 | 288679 | 288694 | 2074 | 2089 | TCTAUTGGAGAAGTGT | 5 | AR | 2852 |
| 1441470 | 217662 | 217677 | 628 | 643 | TGTTUTACGACTGGCA | 39 | AR | 2853 |
| 1441473 | 218084 | 218099 | 1050 | 1065 | TCTAUAGGATGCTGGG | 35 | AR | 2854 |
| 1441476 | 218078 | 218093 | 1044 | 1059 | GGATGCTGGGTCTCTC | 37 | AR | 2855 |
| 1441477 | 235210 | 235225 | N/A | N/A | ATACACAATTTAGCTC | 5 | AR | 337 |
| | 235283 | 235298 | | | | | | |
| 1441480 | 235205 | 235220 | N/A | N/A | CAATUTAGCTCTATTA | 115 | AR | 2856 |
| 1441481 | 288675 | 288690 | 2070 | 2085 | TTGGAGAAGTGTATTA | 6 | AR | 352 |
| 1441483 | 82202 | 82217 | N/A | N/A | CAGAUATTAGCTCATG | 22 | AR | 2857 |
| 1441484 | 226035 | 226050 | N/A | N/A | CAAC [symbol] TCTTGCACCTT | 13 | AR | 2858 |
| 1441489 | 217742 | 217757 | 708 | 723 | TCCT [symbol] CGTTGTTACTT | 12 | AR | 2859 |
| 1441492 | 217738 | 217753 | 704 | 719 | CCGTUGTTACTTCAGC | 11 | AR | 2860 |
| 1441494 | 218105 | 218120 | 1071 | 1086 | CTTTGCAGTGATGTCT | 23 | AR | 2861 |
| 1441499 | 218221 | 218236 | 1187 | 1202 | CTTT [symbol] CAGGATTCATC | 66 | AR | 2862 |
| 1441504 | 222154 | 222169 | 1564 | 1579 | GAACUGACCACCTTCT | 43 | AR | 2863 |
| 1441508 | 244766 | 244781 | N/A | N/A | AGGTAATTTATGAGTT | 8 | AR | 488 |
| 1441512 | 342926 | 342941 | N/A | N/A | GATAATGTGAAGCTTA | 4 | AR | 417 |
| 1441515 | 366242 | 366257 | N/A | N/A | CTAT [symbol] ATATGAAAGCC | 5 | AR | 2476 |
| 1441518 | 181931 | 181946 | N/A | N/A | TGCAGAATTGATAACA | 36 | AR | 2864 |
| 1441522 | 365700 | 365715 | N/A | N/A | CAGTAATATTAAAGCC | 10 | AR | 2480 |
| 1441526 | 508289 | 508304 | N/A | N/A | GATTUTAAGAGTCCAC | 55 | AR | 2865 |
| 1441531 | 222038 | 222053 | 1448 | 1463 | AAGAAGTGTTGTCCAA | 2 | AR | 2866 |
| 1441536 | 155902 | 155917 | N/A | N/A | AGTTATTATATGGCTG | 18 | AR | 414 |
| 1441538 | 251926 | 251941 | N/A | N/A | GGTTUTAAGTTATCTC | 33 | AR | 2867 |
| 1441541 | 229862 | 229877 | N/A | N/A | ATATUGTGTGTCTCAG | 7 | AR | 2868 |
| 1441542 | 285149 | 285164 | 1784 | 1799 | AAATUTCAGTGCTCCC | 10 | AR | 2869 |
| 1441545 | 285468 | 285483 | 2002 | 2017 | ATAC [symbol] TGAGTGACTGA | 3 | AR | 2488 |
| 1441546 | 222162 | 222177 | 1572 | 1587 | CTCT [symbol] CAAGAACTGAC | 39 | AR | 554 |
| 1441549 | 222158 | 222173 | 1568 | 1583 | CCAAGAACTGACCACC | 6 | AR | 2870 |
| 1441769 | 263008 | 263023 | N/A | N/A | GTGAUATGAATGGTAT | 2 | AR | 2871 |
| | 263049 | 263064 | | | | | | |
| 1441774 | 217659 | 217674 | 625 | 640 | TTTA [symbol] GACTGGCAGTG | 26 | AR | 552 |
| 1441775 | 225077 | 225092 | N/A | N/A | GTGTGTATTATTGACC | 15 | AR | 2872 |
| 1441778 | 225072 | 225087 | N/A | N/A | TATTATTGACCTGGTA | 29 | AR | 476 |
| 1441780 | 222234 | 222249 | 1644 | 1659 | CTAGAATAGCCCATCA | 12 | AR | 848 |
| 1441783 | 222231 | 222246 | 1641 | 1656 | GAATAGCCCATCACGA | 48 | AR | 2520 |
| 1441786 | 218175 | 218190 | 1141 | 1156 | ACACAAACCAGCTGAT | 19 | AR | 2522 |
| 1441789 | 218172 | 218187 | 1138 | 1153 | CAAA [symbol] CAGCTGATGAG | 37 | AR | 1097 |
| 1441792 | 218169 | 218184 | 1135 | 1150 | ACCAGCTGATGAGATG | 8 | AR | 2873 |
| 1441794 | 263335 | 263350 | N/A | N/A | GTTTGAAGAATGCATG | 21 | AR | 2526 |
| 1441796 | 344740 | 344755 | N/A | N/A | TTAGUATCCTTCAATG | 99 | AR | 2874 |
| 1441799 | 391182 | 391197 | N/A | N/A | TTAGGATTAAGGAGTT | 7 | AR | 2530 |
| 1441802 | 391179 | 391194 | N/A | N/A | GGATUAAGGAGTTCTG | 67 | AR | 2875 |
| 1441804 | 229906 | 229921 | N/A | N/A | GAACATTTAGAGGCAT | 3 | AR | 915 |
| 1441807 | 229902 | 229917 | N/A | N/A | ATTTAGAGGCATTGCA | 62 | AR | 2498 |
| 1441809 | 222043 | 222058 | 1453 | 1468 | GTATAAAGAAGTGTTG | 14 | AR | 777 |
| 1441811 | 97753 | 97768 | N/A | N/A | TCTCATTAAATCAAGG | 39 | AR | 2500 |
| 1441815 | 350508 | 350523 | N/A | N/A | TTATUATAGGGTTGAA | 43 | AR | 2876 |
| 1441819 | 290652 | 290667 | 2131 | 2146 | GGTAAGGCAATGGACT | 17 | AR | 2505 |
| 1441823 | 82465 | 82480 | N/A | N/A | TGAA [symbol] AATGCTGATTC | 57 | AR | 2506 |
| 1441826 | 82461 | 82476 | N/A | N/A | CAATGCTGATTCAGGC | 40 | AR | 2877 |
| 1441829 | 368429 | 368444 | N/A | N/A | GTGAUATTGTATAAGG | 7 | AR | 2878 |
| 1441832 | 368425 | 368440 | N/A | N/A | TATTGTATAAGGTTAG | 13 | AR | 2510 |
| 1441834 | 242392 | 242407 | N/A | N/A | ACCGUCAAGTAATGAG | 45 | AR | 2879 |
| 1441837 | 242389 | 242404 | N/A | N/A | GTCAAGTAATGAGTTT | 3 | AR | 758 |
| 1441840 | 285252 | 285267 | 1887 | 1902 | CTTTUGAATCTGTCCA | 5 | AR | 2880 |
| 1441843 | 285187 | 285202 | 1822 | 1837 | GGTA [symbol] CATTACTGAGA | 56 | AR | 2881 |
| 1441846 | 217792 | 217807 | 758 | 773 | CTCCAGTTAACAGCGC | 31 | AR | 2516 |
| 1441849 | 217788 | 217803 | 754 | 769 | AGTTAACAGCGCGGTG | 22 | AR | 2517 |
| 1441942 | 82198 | 82213 | N/A | N/A | TATTAGCTCATGGAAA | 51 | AR | 2091 |
| 1441945 | 229161 | 229176 | N/A | N/A | AAGTATTAACCACCAT | 6 | AR | 1913 |
| 1441949 | 463907 | 463922 | N/A | N/A | AGATUTAATAGGTCTT | 88 | AR | 2882 |
| 1441951 | 331865 | 331880 | N/A | N/A | ACTAUAGTATGATAGC | 59 | AR | 2883 |
| 1441954 | 331862 | 331877 | N/A | N/A | ATAGUATGATAGCACA | 2 | AR | 2884 |
| 1441957 | 331859 | 331874 | N/A | N/A | GTATGATAGCACAAAC | 10 | AR | 2540 |
| 1441960 | 236801 | 236816 | N/A | N/A | TTGTUATACTGATGGG | 6 | AR | 2885 |
| 1441963 | 236798 | 236813 | N/A | N/A | TTATACTGATGGGCTA | 10 | AR | 2545 |
| 1441966 | 217510 | 217525 | 476 | 491 | GCTGUAAACTTTGTTC | 72 | AR | 2886 |
| 1441968 | 217564 | 217579 | 530 | 545 | CGGAAATGATTCTGGC | 21 | AR | 2161 |
| 1441972 | 561179 | 561194 | 10168 | 10183 | GAATUGAAGTTAGGGT | 39 | AR | 2887 |
| 1441973 | 222019 | 222034 | 1429 | 1444 | GGTTUCAAACTGGGAG | 35 | AR | 2888 |
| 1441976 | 222013 | 222028 | 1423 | 1438 | AAACUGGGAGCTGTAC | 45 | AR | 2889 |
| 1442030 | 217668 | 217683 | 634 | 649 | TCTCUGTGTTTTACGA | 9 | AR | 2890 |
| 1442035 | 217746 | 217761 | 712 | 727 | ACTTUCCTCCGTTGTT | 32 | AR | 2891 |
| 1442038 | 218098 | 218113 | 1064 | 1079 | GTGAUGTCTCAAAATC | 16 | AR | 2892 |
| 1442040 | 222177 | 222192 | 1587 | 1602 | CCTC [symbol] CCCTGATGTCC | 26 | AR | 2893 |
| 1442042 | 508284 | 508299 | N/A | N/A | TAAGAGTCCACTAGCC | 79 | AR | 2550 |
| 1442043 | 181922 | 181937 | N/A | N/A | GATAACAGGTAAATTA | 90 | AR | 2894 |
| 1441461 | 288683 | 288698 | 2078 | 2093 | AATAUCTATTGGAGAA | 7 | AS | 2895 |
| 1441464 | 288680 | 288695 | 2075 | 2090 | ATCTATTGGAGAAGTG | 3 | AS | 260 |
| 1441467 | 288677 | 288692 | 2072 | 2087 | TATTGGAGAAGTGTAT | 33 | AS | 859 |
| 1441469 | 217665 | 217680 | 631 | 646 | CTGTGTTTTACGACTG | 12 | AS | 2896 |
| 1441472 | 217660 | 217675 | 626 | 641 | TTTTACGACTGGCAGT | 14 | AS | 629 |
| 1441475 | 218082 | 218097 | 1048 | 1063 | TATAGGATGCTGGGTC | 31 | AS | 100 |
| 1441479 | 235208 | 235223 | N/A | N/A | ACACAATTTAGCTCTA | 2 | AS | 341 |
| 1441482 | 82207 | 82222 | N/A | N/A | ACTTUCAGATATTAGC | 33 | AS | 2897 |
| 1441486 | 226033 | 226048 | N/A | N/A | ACCT [symbol] TTGCACCTTTC | 7 | AS | 2898 |
| 1441488 | 217743 | 217758 | 709 | 724 | TTCCUCCGTTGTTACT | 19 | AS | 2899 |
| 1441491 | 217739 | 217754 | 705 | 720 | TCCGUTGTTACTTCAG | 5 | AS | 2900 |
| 1441493 | 218106 | 218121 | 1072 | 1087 | TCTTUGCAGTGATGTC | 10 | AS | 2901 |
| 1441496 | 218101 | 218116 | 1067 | 1082 | GCAGUGATGTCTCAAA | 27 | AS | 2902 |
| 1441498 | 218224 | 218239 | 1190 | 1205 | GAGCUTTCCAGGATTC | 23 | AS | 2903 |
| 1441502 | 222169 | 222184 | 1579 | 1594 | TGATGTCCTCTCCAAG | 39 | AS | 2904 |
| 1441503 | 222155 | 222170 | 1565 | 1580 | AGAA [symbol] TGACCACCTTC | 8 | AS | 2905 |
| 1441507 | 244768 | 244783 | N/A | N/A | ATAGGTAATTTATGAG | 81 | AS | 2492 |
| 1441511 | 342928 | 342943 | N/A | N/A | GAGAUAATGTGAAGCT | 3 | AS | 2906 |
| 1441514 | 366243 | 366258 | N/A | N/A | ACTAUCATATGAAAGC | 32 | AS | 2907 |
| 1441517 | 181932 | 181947 | N/A | N/A | ATGCAGAATTGATAAC | 57 | AS | 2478 |
| 1441520 | 181927 | 181942 | N/A | N/A | GAATUGATAACAGGTA | 10 | AS | 2908 |
| 1441521 | 365701 | 365716 | N/A | N/A | GCAGUAATATTAAAGC | 89 | AS | 2909 |
| 1441525 | 508291 | 508306 | N/A | N/A | GTGAUTTTAAGAGTCC | 25 | AS | 2910 |
| 1441528 | 508286 | 508301 | N/A | N/A | TTTAAGAGTCCACTAG | 96 | AS | 2482 |
| 1441530 | 222039 | 222054 | 1449 | 1464 | AAAGAAGTGTTGTCCA | 2 | AS | 526 |
| 1441533 | 222036 | 222051 | 1446 | 1461 | GAAGUGTTGTCCAAAA | 29 | AS | 2911 |
| 1441535 | 155903 | 155918 | N/A | N/A | AAGTUATTATATGGCT | 45 | AS | 2912 |
| 1441540 | 229866 | 229881 | N/A | N/A | CTCAATATTGTGTGTC | 21 | AS | 609 |
| 1441544 | N/A | N/A | 2003 | 2018 | AATA [symbol] CTGAGTGACTG | 3 | AS | 2487 |
| 1441548 | 222159 | 222174 | 1569 | 1584 | TCCAAGAACTGACCAC | 7 | AS | 469 |
| 1441768 | 263009 | 263024 | N/A | N/A | AGTGATATGAATGGTA | 4 | AS | 153 |
| | 263050 | 263065 | | | | | | |
| 1441771 | 263006 | 263021 | N/A | N/A | GATAUGAATGGTATGA | 10 | AS | 2913 |
| | 263047 | 263062 | | | | | | |
| 1441773 | 218085 | 218100 | 1051 | 1066 | ATCTATAGGATGCTGG | 43 | AS | 781 |
| 1441777 | 225073 | 225088 | N/A | N/A | GTATUATTGACCTGGT | 22 | AS | 2914 |
| 1441779 | 222235 | 222250 | 1645 | 1660 | ACTAGAATAGCCCATC | 16 | AS | 922 |
| 1441782 | 222232 | 222247 | 1642 | 1657 | AGAAUAGCCCATCACG | 17 | AS | 2915 |
| 1441785 | 222229 | 222244 | 1639 | 1654 | ATAG [symbol] CCATCACGATG | 38 | AS | 2916 |
| 1441788 | 218173 | 218188 | 1139 | 1154 | ACAAACCAGCTGATGA | 14 | AS | 2524 |
| 1441791 | 218170 | 218185 | 1136 | 1151 | AACCAGCTGATGAGAT | 10 | AS | 2525 |
| 1441793 | 263338 | 263353 | N/A | N/A | GAAGUTTGAAGAATGC | 16 | AS | 2917 |
| 1441795 | 344746 | 344761 | N/A | N/A | CTAAATTTAGTATCCT | 13 | AS | 2527 |
| 1441798 | 391183 | 391198 | N/A | N/A | ATTAGGATTAAGGAGT | 28 | AS | 2529 |
| 1441801 | 391180 | 391195 | N/A | N/A | AGGAUTAAGGAGTTCT | 77 | AS | 2918 |
| 1441806 | 229903 | 229918 | N/A | N/A | CATTUAGAGGCATTGC | 52 | AS | 2919 |
| 1441808 | 222047 | 222062 | 1457 | 1472 | TGTAGTATAAAGAAGT | 21 | AS | 2499 |
| 1441810 | 97754 | 97769 | N/A | N/A | GTCT [symbol] ATTAAATCAAG | 36 | AS | 2920 |
| 1441813 | 97751 | 97766 | N/A | N/A | TCATUAAATCAAGGCA | 27 | AS | 2921 |
| 1441814 | 350509 | 350524 | N/A | N/A | TTTAUTATAGGGTTGA | 14 | AS | 2922 |
| 1441818 | 290653 | 290668 | 2132 | 2147 | AGGTAAGGCAATGGAC | 17 | AS | 2504 |
| 1441822 | 233649 | 233664 | N/A | N/A | GCTCATTAAGTTCTTC | 8 | AS | 870 |
| 1441825 | 82462 | 82477 | N/A | N/A | ACAAUGCTGATTCAGG | 13 | AS | 2923 |
| 1441828 | 368430 | 368445 | N/A | N/A | GGTGATATTGTATAAG | 18 | AS | 2508 |
| 1441831 | 368427 | 368442 | N/A | N/A | GATAUTGTATAAGGTT | 3 | AS | 2924 |
| 1441836 | 242390 | 242405 | N/A | N/A | CGTCAAGTAATGAGTT | 5 | AS | 2512 |
| 1441839 | 285253 | 285268 | 1888 | 1903 | TCTTUTGAATCTGTCC | 5 | AS | 2925 |
| 1441842 | 285188 | 285203 | 1823 | 1838 | TGGTACCATTACTGAG | 78 | AS | 2515 |
| 1441845 | 285185 | 285200 | 1820 | 1835 | TACCATTACTGAGATT | 5 | AS | 616 |
| 1441848 | 217789 | 217804 | 755 | 770 | CAGTUAACAGCGCGGT | 25 | AS | 2926 |
| 1441851 | 217786 | 217801 | 752 | 767 | TTAA [symbol] AGCGCGGTGAG | 34 | AS | 2519 |
| 1441941 | 82200 | 82215 | N/A | N/A | GATAUTAGCTCATGGA | 62 | AS | 2927 |
| 1441943 | 218034 | 218049 | 1000 | 1015 | CACT [symbol] CTTGAAATTCC | 5 | AS | 2928 |
| 1441944 | 229163 | 229178 | N/A | N/A | TAAAGTATTAACCACC | 3 | AS | 1964 |
| 1441948 | 463910 | 463925 | N/A | N/A | GTCAGATTTAATAGGT | 23 | AS | 2929 |
| 1441953 | 331863 | 331878 | N/A | N/A | TATAGTATGATAGCAC | 21 | AS | 1607 |
| 1441956 | 331860 | 331875 | N/A | N/A | AGTAUGATAGCACAAA | 4 | AS | 2930 |
| 1441959 | 236802 | 236817 | N/A | N/A | ATTGUTATACTGATGG | 12 | AS | 2931 |
| 1441962 | 236799 | 236814 | N/A | N/A | GTTAUACTGATGGGCT | 39 | AS | 2932 |
| 1441965 | 217512 | 217527 | 478 | 493 | GGGCUGTAAACTTTGT | 34 | AS | 2933 |
| 1441967 | 217565 | 217580 | 531 | 546 | CCGGAAATGATTCTGG | 69 | AS | 2238 |
| 1441971 | 561180 | 561195 | 10169 | 10184 | GGAAUTGAAGTTAGGG | 20 | AS | 2934 |
| 1441975 | 222017 | 222032 | 1427 | 1442 | TTTCAAACTGGGAGCT | 16 | AS | 2548 |
| 1442029 | 217669 | 217684 | 635 | 650 | CTCT [symbol] TGTGTTTTACG | 7 | AS | 2935 |
| 1442033 | 235212 | 235227 | N/A | N/A | TTATACACAATTTAGC | 62 | AS | 334 |
| | 235285 | 235300 | | | | | | |
| 1442034 | 226037 | 226052 | N/A | N/A | CCCAACCTCTTGCACC | 51 | AS | 2549 |
| 1442039 | 218217 | 218232 | 1183 | 1198 | CCAGGATTCATCCCAA | 37 | AS | 2936 |
| 1442041 | 342921 | 342936 | N/A | N/A | TGTGAAGCTTAGAACC | 10 | AS | 2937 |
| 1442044 | 244760 | 244775 | N/A | N/A | TTTAUGAGTTAAAGGG | 34 | AS | 2938 |
| 1441463 | 288681 | 288696 | 2076 | 2091 | TATCUATTGGAGAAGT | 5 | AT | 2939 |
| 1441466 | 288678 | 288693 | 2073 | 2088 | CTATUGGAGAAGTGTA | 4 | AT | 2940 |
| 1441468 | 217667 | 217682 | 633 | 648 | CTCTGTGTTTTACGAC | 10 | AT | 2941 |
| 1441471 | 217661 | 217676 | 627 | 642 | GTTTUACGACTGGCAG | 13 | AT | 2942 |
| 1441474 | 218083 | 218098 | 1049 | 1064 | CTATAGGATGCTGGGT | 46 | AT | 628 |
| 1441478 | 235209 | 235224 | N/A | N/A | TACA [symbol] AATTTAGCTCT | 3 | AT | 152 |
| | 235282 | 235297 | | | | | | |
| 1441485 | 226034 | 226049 | N/A | N/A | AACCUCTTGCACCTTT | 8 | AT | 2943 |
| 1441487 | 217744 | 217759 | 710 | 725 | TTTC [symbol] TCCGTTGTTAC | 30 | AT | 2944 |
| 1441490 | 217740 | 217755 | 706 | 721 | CTCCGTTGTTACTTCA | 5 | AT | 2945 |
| 1441495 | 218104 | 218119 | 1070 | 1085 | TTTG [symbol] AGTGATGTCTC | 11 | AT | 2946 |
| 1441497 | 218225 | 218240 | 1191 | 1206 | GGAG [symbol] TTTCCAGGATT | 25 | AT | 2947 |
| 1441500 | 218219 | 218234 | 1185 | 1200 | TTCCAGGATTCATCCC | 24 | AT | 2948 |
| 1441501 | 222175 | 222190 | 1585 | 1600 | TCCC [symbol] CTGATGTCCTC | 12 | AT | 2949 |
| 1441505 | 222149 | 222164 | 1559 | 1574 | GACCACCTTCTTTAAT | 35 | AT | 2491 |
| 1441506 | 244769 | 244784 | N/A | N/A | TATAGGTAATTTATGA | 91 | AT | 653 |
| 1441509 | 244765 | 244780 | N/A | N/A | GGTAATTTATGAGTTA | 7 | AT | 455 |
| 1441510 | 342929 | 342944 | N/A | N/A | TGAGATAATGTGAAGC | 6 | AT | 2493 |
| 1441513 | 342925 | 342940 | N/A | N/A | ATAAUGTGAAGCTTAG | 7 | AT | 2950 |
| 1441516 | 366241 | 366256 | N/A | N/A | TATCATATGAAAGCCA | 6 | AT | 2477 |
| 1441519 | 181930 | 181945 | N/A | N/A | GCAGAATTGATAACAG | 13 | AT | 562 |
| 1441523 | 365698 | 365713 | N/A | N/A | GTAAUATTAAAGCCAG | 2 | AT | 2951 |
| 1441524 | 508292 | 508307 | N/A | N/A | GGTGATTTTAAGAGTC | 22 | AT | 2952 |
| 1441527 | 508287 | 508302 | N/A | N/A | TTTTAAGAGTCCACTA | 84 | AT | 2481 |
| 1441529 | 222040 | 222055 | 1450 | 1465 | TAAAGAAGTGTTGTCC | 9 | AT | 2483 |
| 1441532 | 222037 | 222052 | 1447 | 1462 | AGAAGTGTTGTCCAAA | 2 | AT | 2953 |
| 1441534 | 155904 | 155919 | N/A | N/A | GAAGUTATTATATGGC | 10 | AT | 2954 |
| 1441537 | 155901 | 155916 | N/A | N/A | GTTAUTATATGGCTGT | 3 | AT | 2955 |
| 1441539 | 229868 | 229883 | N/A | N/A | ATCT [symbol] AATATTGTGTG | 25 | AT | 2956 |
| 1441543 | N/A | N/A | 2005 | 2020 | GAAAUACCTGAGTGAC | 7 | AT | 2957 |
| 1441547 | 222160 | 222175 | 1570 | 1585 | CTCCAAGAACTGACCA | 7 | AT | 546 |
| 1441550 | 222157 | 222172 | 1567 | 1582 | CAAGAACTGACCACCT | 5 | AT | 2472 |
| 1441767 | 263010 | 263025 | N/A | N/A | AAGTGATATGAATGGT | 3 | AT | 1167 |
| | 263051 | 263066 | | | | | | |
| 1441770 | 263007 | 263022 | N/A | N/A | TGATATGAATGGTATG | 6 | AT | 1012 |
| | 263048 | 263063 | | | | | | |
| 1441772 | 218086 | 218101 | 1052 | 1067 | AATCUATAGGATGCTG | 27 | AT | 2958 |
| 1441776 | 225075 | 225090 | N/A | N/A | GTGTATTATTGACCTG | 2 | AT | 630 |
| 1441781 | 222233 | 222248 | 1643 | 1658 | TAGAATAGCCCATCAC | 22 | AT | 779 |
| 1441784 | 222230 | 222245 | 1640 | 1655 | AATAGCCCATCACGAT | 21 | AT | 2521 |
| 1441787 | 218174 | 218189 | 1140 | 1155 | CACAAACCAGCTGATG | 24 | AT | 2523 |
| 1441790 | 218171 | 218186 | 1137 | 1152 | AAAC [symbol] AGCTGATGAGA | 12 | AT | 2959 |
| 1441797 | 391184 | 391199 | N/A | N/A | AATTAGGATTAAGGAG | 54 | AT | 2528 |
| 1441800 | 391181 | 391196 | N/A | N/A | TAGGATTAAGGAGTTC | 9 | AT | 649 |
| 1441803 | 391178 | 391193 | N/A | N/A | GATTAAGGAGTTCTGT | 24 | AT | 2533 |
| 1441805 | 229904 | 229919 | N/A | N/A | ACATUTAGAGGCATTG | 70 | AT | 2960 |
| 1441812 | 97752 | 97767 | N/A | N/A | CTCAUTAAATCAAGGC | 37 | AT | 2961 |
| 1441816 | 350507 | 350522 | N/A | N/A | TATTATAGGGTTGAAA | 115 | AT | 2503 |
| 1441817 | 290657 | 290672 | 2136 | 2151 | GCACAGGTAAGGCAAT | 8 | AT | 784 |
| 1441820 | 290651 | 290666 | 2130 | 2145 | GTAAGGCAATGGACTC | 6 | AT | 2962 |
| 1441821 | 233651 | 233666 | N/A | N/A | CTGCUCATTAAGTTCT | 28 | AT | 2963 |
| 1441824 | 82464 | 82479 | N/A | N/A | GAACAATGCTGATTCA | 43 | AT | 955 |
| 1441827 | 82460 | 82475 | N/A | N/A | AATG [symbol] TGATTCAGGCA | 72 | AT | 2964 |
| 1441830 | 368428 | 368443 | N/A | N/A | TGATATTGTATAAGGT | 10 | AT | 2509 |
| 1441833 | 368424 | 368439 | N/A | N/A | ATTGUATAAGGTTAGG | 10 | AT | 2965 |
| 1441835 | 242391 | 242406 | N/A | N/A | CCGT [symbol] AAGTAATGAGT | 53 | AT | 2966 |
| 1441838 | 285255 | 285270 | 1890 | 1905 | GATCUTTTGAATCTGT | 7 | AT | 2967 |
| 1441841 | 285251 | 285266 | 1886 | 1901 | TTTTGAATCTGTCCAG | 5 | AT | 2968 |
| 1441844 | 285186 | 285201 | 1821 | 1836 | GTAC [symbol] ATTACTGAGAT | 17 | AT | 2969 |
| 1441847 | 217790 | 217805 | 756 | 771 | CCAGUTAACAGCGCGG | 43 | AT | 2970 |
| 1441850 | 217787 | 217802 | 753 | 768 | GTTAACAGCGCGGTGA | 18 | AT | 2518 |
| 1441852 | 222236 | 222251 | 1646 | 1661 | CACTAGAATAGCCCAT | 8 | AT | 1001 |
| 1441940 | 82201 | 82216 | N/A | N/A | AGATATTAGCTCATGG | 27 | AT | 2246 |
| 1441946 | 229160 | 229175 | N/A | N/A | AGTAUTAACCACCATT | 38 | AT | 2971 |
| 1441947 | 463911 | 463926 | N/A | N/A | TGTCAGATTTAATAGG | 72 | AT | 2972 |
| 1441950 | 184997 | 185012 | N/A | N/A | GTGTATTAGGTTTTTC | 47 | AT | 1840 |
| 1441952 | 331864 | 331879 | N/A | N/A | CTATAGTATGATAGCA | 44 | AT | 2537 |
| 1441955 | 331861 | 331876 | N/A | N/A | TAGTATGATAGCACAA | 3 | AT | 2538 |
| 1441958 | 236803 | 236818 | N/A | N/A | AATTGTTATACTGATG | 41 | AT | 2541 |
| 1441961 | 236800 | 236815 | N/A | N/A | TGTTATACTGATGGGC | 33 | AT | 1304 |
| 1441964 | 236797 | 236812 | N/A | N/A | TATA [symbol] TGATGGGCTAG | 17 | AT | 2546 |
| 1441969 | 217563 | 217578 | 529 | 544 | GGAAATGATTCTGGCT | 12 | AT | 2973 |
| 1441970 | 561183 | 561198 | 10172 | 10187 | TCAGGAATTGAAGTTA | 20 | AT | 2974 |
| 1441974 | 222018 | 222033 | 1428 | 1443 | GTTT [symbol] AAACTGGGAGC | 27 | AT | 2975 |
| 1442031 | 217658 | 217673 | 624 | 639 | TTACGACTGGCAGTGT | 20 | AT | 475 |
| 1442032 | 218076 | 218091 | 1042 | 1057 | ATGCUGGGTCTCTCTC | 32 | AT | 2976 |
| 1442036 | 217736 | 217751 | 702 | 717 | GTTGUTACTTCAGCTG | 51 | AT | 2977 |
| 1442037 | 218108 | 218123 | 1074 | 1089 | GTTCUTTGCAGTGATG | 12 | AT | 2978 |
| 1442045 | 229860 | 229875 | N/A | N/A | ATTGUGTGTCTCAGGC | 9 | AT | 2979 |
| 1442046 | 285147 | 285162 | 1782 | 1797 | ATTT [symbol] AGTGCTCCCCA | 8 | AT | 2980 |
| 1442047 | 285466 | 285481 | 2000 | 2015 | ACCTGAGTGACTGATC | 10 | AU | 2981 |
| 1442101 | 263003 | 263018 | N/A | N/A | ATGAATGGTATGATGG | 8 | AU | 2553 |
| 1442102 | 217657 | 217672 | 623 | 638 | TACGACTGGCAGTGTC | 18 | AU | 2982 |
| 1442103 | 222237 | 222252 | 1647 | 1662 | CCACUAGAATAGCCCA | 4 | AU | 2983 |
| 1442104 | 222227 | 222242 | 1637 | 1652 | AGCC [symbol] ATCACGATGCC | 47 | AU | 2984 |
| 1442105 | 326723 | 326738 | N/A | N/A | GATTATGAGGAAACCT | 8 | AU | 2552 |
| 1442106 | 263333 | 263348 | N/A | N/A | TTGAAGAATGCATGTC | 12 | AU | 2554 |
| 1442107 | 344738 | 344753 | N/A | N/A | AGTAUCCTTCAATGGC | 8 | AU | 2985 |
| 1442108 | 391186 | 391201 | N/A | N/A | TTAAUTAGGATTAAGG | 85 | AU | 2986 |
| 1442109 | 391176 | 391191 | N/A | N/A | TTAAGGAGTTCTGTGT | 75 | AU | 2556 |
| 1442110 | 229900 | 229915 | N/A | N/A | TTAGAGGCATTGCAGG | 23 | AU | 2557 |
| 1442111 | 222051 | 222066 | 1461 | 1476 | GCACUGTAGTATAAAG | 19 | AU | 2987 |
| 1442112 | 97747 | 97762 | N/A | N/A | TAAAUCAAGGCAAGTG | 70 | AU | 2988 |
| 1442113 | 350504 | 350519 | N/A | N/A | TATAGGGTTGAAAATA | 52 | AU | 2558 |
| 1442114 | 233653 | 233668 | N/A | N/A | AGCTGCTCATTAAGTT | 106 | AU | 2989 |
| 1442115 | 82458 | 82473 | N/A | N/A | TGCTGATTCAGGCAGT | 66 | AU | 2990 |
| 1442116 | 368422 | 368437 | N/A | N/A | TGTAUAAGGTTAGGTG | 33 | AU | 2991 |
| 1442117 | 242394 | 242409 | N/A | N/A | GTAC [symbol] GTCAAGTAATG | 73 | AU | 2992 |
| 1442118 | 285249 | 285264 | 1884 | 1899 | TTGAATCTGTCCAGCT | 18 | AU | 2993 |
| 1442119 | 217794 | 217809 | 760 | 775 | GTCT [symbol] CAGTTAACAGC | 33 | AU | 2994 |
| 1442120 | 217784 | 217799 | 750 | 765 | AACAGCGCGGTGAGAT | 26 | AU | 2995 |
| 1442121 | 222238 | 222253 | 1648 | 1663 | GCCA [symbol] TAGAATAGCCC | 31 | AU | 2560 |
| 1442122 | 222228 | 222243 | 1638 | 1653 | TAGC [symbol] CATCACGATGC | 42 | AU | 2996 |
| 1442143 | 82196 | 82211 | N/A | N/A | TTAG [symbol] TCATGGAAAGC | 18 | AV | 2997 |
| 1442144 | 229158 | 229173 | N/A | N/A | TATTAACCACCATTCC | 9 | AV | 2561 |
| 1442145 | 185002 | 185017 | N/A | N/A | GCACUGTGTATTAGGT | 39 | AV | 2998 |
| 1442146 | 331857 | 331872 | N/A | N/A | ATGAUAGCACAAACCA | 3 | AV | 2999 |
| 1442147 | 236795 | 236810 | N/A | N/A | TACTGATGGGCTAGCC | 79 | AV | 2562 |
| 1442148 | 217514 | 217529 | 480 | 495 | ATGGGCTGTAAACTTT | 14 | AV | 3000 |
| 1442149 | 217513 | 217528 | 479 | 494 | TGGG [symbol] TGTAAACTTTG | 14 | AV | 3001 |
| 1442150 | 217567 | 217582 | 533 | 548 | TTCCGGAAATGATTCT | 29 | AV | 2563 |
| 1442151 | 222021 | 222036 | 1431 | 1446 | ATGGUTTCAAACTGGG | 17 | AV | 3002 |
| 1411019 | 94388 | 94403 | N/A | N/A | CAGG [symbol] TGCTATTAAAG | 87 | E | 386 |

[0473] The modified oligonucleotides in Table 4 below are 16 nucleosides in length. The sugar motif for the modified oligonucleotides is (from 5′ to 3′): kkdddddddddkekek; wherein each “d” represents a 2′-β-D-deoxyribosyl sugar moiety, each “k” represents a cEt modified sugar moiety, and each “e” represents a 2′-MOE sugar moiety. The internucleoside linkage motif for the modified oligonucleotides is (from 5′ to 3′): sssssssssssssss; wherein each “s” represents a phosphorothioate internucleoside linkage. Each cytosine residue is a 5-methylcytosine.

TABLE 4
Reduction of PSD3 RNA by mixed cEt/MOE modified oligonucleotides
with uniform phosphorothioate internucleoside linkages

| | SEQ ID | SEQ ID | SEQ ID | SEQ ID | | DMPK | | |
|---|---|---|---|---|---|---|---|---|
| Compound | NO: 1 | NO: 1 | NO: 2 | NO: 2 | | (% UTC) | | SEQ |
| No. | Start Site | Stop Site | Start Site | Stop Site | Sequence (5′ to 3′) | RTS41435 | AID | ID NO |
| 1441254 | 288683 | 288698 | 2078 | 2093 | AATATCTATTGGAGAA | 12 | AK | 1168 |
| 1441257 | 288680 | 288695 | 2075 | 2090 | ATCTATTGGAGAAGTG | 4 | AK | 260 |
| 1441260 | 288677 | 288692 | 2072 | 2087 | TATTGGAGAAGTGTAT | 4 | AK | 859 |
| 1441262 | 217666 | 217681 | 632 | 647 | TCTGTGTTTTACGACT | 9 | AK | 346 |
| 1441265 | 217663 | 217678 | 629 | 644 | GTGTTTTACGACTGGC | 10 | AK | 782 |
| 1441268 | 217660 | 217675 | 626 | 641 | TTTTACGACTGGCAGT | 35 | AK | 629 |
| 1441269 | 218084 | 218099 | 1050 | 1065 | TCTATAGGATGCTGGG | 26 | AK | 704 |
| 1441272 | 218081 | 218096 | 1047 | 1062 | ATAGGATGCTGGGTCT | 22 | AK | 551 |
| 1441275 | 218078 | 218093 | 1044 | 1059 | GGATGCTGGGTCTCTC | 9 | AK | 2855 |
| 1441276 | 235210 | 235225 | N/A | N/A | ATACACAATTTAGCTC | 18 | AK | 337 |
| | 235283 | 235298 | | | | | | |
| 1441279 | 235205 | 235220 | N/A | N/A | CAATTTAGCTCTATTA | 23 | AK | 2489 |
| 1441282 | 288674 | 288689 | 2069 | 2084 | TGGAGAAGTGTATTAA | 5 | AK | 350 |
| 1441284 | 82202 | 82217 | N/A | N/A | CAGATATTAGCTCATG | 6 | AK | 2324 |
| 1441287 | 226033 | 226048 | N/A | N/A | ACCTCTTGCACCTTTC | 7 | AK | 2898 |
| 1441291 | 217742 | 217757 | 708 | 723 | TCCTCCGTTGTTACTT | 18 | AK | 2859 |
| 1441294 | 217739 | 217754 | 705 | 720 | TCCGTTGTTACTTCAG | 6 | AK | 3003 |
| 1441298 | 218104 | 218119 | 1070 | 1085 | TTTGCAGTGATGTCTC | 5 | AK | 2946 |
| 1441301 | 218101 | 218116 | 1067 | 1082 | GCAGTGATGTCTCAAA | 13 | AK | 3004 |
| 1441304 | 218222 | 218237 | 1188 | 1203 | GCTTTCCAGGATTCAT | 10 | AK | 3005 |
| 1441308 | 222169 | 222184 | 1579 | 1594 | TGATGTCCTCTCCAAG | 8 | AK | 2904 |
| 1441309 | 222155 | 222170 | 1565 | 1580 | AGAACTGACCACCTTC | 7 | AK | 2905 |
| 1441312 | 244769 | 244784 | N/A | N/A | TATAGGTAATTTATGA | 97 | AK | 653 |
| 1441315 | 244765 | 244780 | N/A | N/A | GGTAATTTATGAGTTA | 17 | AK | 455 |
| 1441316 | 342929 | 342944 | N/A | N/A | TGAGATAATGTGAAGC | 4 | AK | 2493 |
| 1441320 | 342925 | 342940 | N/A | N/A | ATAATGTGAAGCTTAG | 8 | AK | 2495 |
| 1441323 | 366241 | 366256 | N/A | N/A | TATCATATGAAAGCCA | 24 | AK | 2477 |
| 1441324 | 181932 | 181947 | N/A | N/A | ATGCAGAATTGATAAC | 46 | AK | 2478 |
| 1441327 | 181927 | 181942 | N/A | N/A | GAATTGATAACAGGTA | 3 | AK | 449 |
| 1441330 | 365698 | 365713 | N/A | N/A | GTAATATTAAAGCCAG | 17 | AK | 441 |
| 1441333 | 508289 | 508304 | N/A | N/A | GATTTTAAGAGTCCAC | 38 | AK | 444 |
| 1441337 | 222039 | 222054 | 1449 | 1464 | AAAGAAGTGTTGTCCA | 5 | AK | 526 |
| 1441340 | 222036 | 222051 | 1446 | 1461 | GAAGTGTTGTCCAAAA | 3 | AK | 3006 |
| 1441343 | 155902 | 155917 | N/A | N/A | AGTTATTATATGGCTG | 113 | AK | 414 |
| 1441348 | 229862 | 229877 | N/A | N/A | ATATTGTGTGTCTCAG | 14 | AK | 3007 |
| 1441349 | 285149 | 285164 | 1784 | 1799 | AAATTTCAGTGCTCCC | 25 | AK | 2278 |
| 1441352 | 285468 | 285483 | 2002 | 2017 | ATACCTGAGTGACTGA | 4 | AK | 2488 |
| 1441355 | 222159 | 222174 | 1569 | 1584 | TCCAAGAACTGACCAC | 31 | AK | 469 |
| 1441581 | 263010 | 263025 | N/A | N/A | AAGTGATATGAATGGT | 5 | AK | 1167 |
| | 263051 | 263066 | | | | | | |
| 1441584 | 263007 | 263022 | N/A | N/A | TGATATGAATGGTATG | 4 | AK | 1012 |
| | 263048 | 263063 | | | | | | |
| 1441590 | 225077 | 225092 | N/A | N/A | GTGTGTATTATTGACC | 4 | AK | 2872 |
| 1441593 | 225074 | 225089 | N/A | N/A | TGTATTATTGACCTGG | 62 | AK | 553 |
| 1441598 | 222233 | 222248 | 1643 | 1658 | TAGAATAGCCCATCAC | 10 | AK | 779 |
| 1441601 | 222230 | 222245 | 1640 | 1655 | AATAGCCCATCACGAT | 38 | AK | 2521 |
| 1441603 | 218175 | 218190 | 1141 | 1156 | ACACAAACCAGCTGAT | 48 | AK | 2522 |
| 1441606 | 218172 | 218187 | 1138 | 1153 | CAAACCAGCTGATGAG | 35 | AK | 1097 |
| 1441609 | 218169 | 218184 | 1135 | 1150 | ACCAGCTGATGAGATG | 15 | AK | 2873 |
| 1441614 | 391184 | 391199 | N/A | N/A | AATTAGGATTAAGGAG | 14 | AK | 2528 |
| 1441617 | 391181 | 391196 | N/A | N/A | TAGGATTAAGGAGTTC | 18 | AK | 649 |
| 1441620 | 391178 | 391193 | N/A | N/A | GATTAAGGAGTTCTGT | 33 | AK | 2533 |
| 1441621 | 229906 | 229921 | N/A | N/A | GAACATTTAGAGGCAT | 15 | AK | 915 |
| 1441624 | 229902 | 229917 | N/A | N/A | ATTTAGAGGCATTGCA | 66 | AK | 2498 |
| 1441625 | 222047 | 222062 | 1457 | 1472 | TGTAGTATAAAGAAGT | 11 | AK | 2499 |
| 1441628 | 97753 | 97768 | N/A | N/A | TCTCATTAAATCAAGG | 20 | AK | 2500 |
| 1441633 | 350507 | 350522 | N/A | N/A | TATTATAGGGTTGAAA | 18 | AK | 2503 |
| 1441635 | 290653 | 290668 | 2132 | 2147 | AGGTAAGGCAATGGAC | 4 | AK | 2504 |
| 1441640 | 82465 | 82480 | N/A | N/A | TGAACAATGCTGATTC | 6 | AK | 2506 |
| 1441643 | 82461 | 82476 | N/A | N/A | CAATGCTGATTCAGGC | 6 | AK | 2877 |
| 1441647 | 368428 | 368443 | N/A | N/A | TGATATTGTATAAGGT | 4 | AK | 2509 |
| 1441650 | 368424 | 368439 | N/A | N/A | ATTGTATAAGGTTAGG | 3 | AK | 2511 |
| 1441653 | 242390 | 242405 | N/A | N/A | CGTCAAGTAATGAGTT | 4 | AK | 2512 |
| 1441657 | 285252 | 285267 | 1887 | 1902 | CTTTTGAATCTGTCCA | 5 | AK | 3008 |
| 1441660 | 285187 | 285202 | 1822 | 1837 | GGTACCATTACTGAGA | 19 | AK | 2881 |
| 1441663 | 217792 | 217807 | 758 | 773 | CTCCAGTTAACAGCGC | 44 | AK | 2516 |
| 1441666 | 217789 | 217804 | 755 | 770 | CAGTTAACAGCGCGGT | 35 | AK | 1241 |
| 1441669 | 217786 | 217801 | 752 | 767 | TTAACAGCGCGGTGAG | 40 | AK | 2519 |
| 1441670 | 222236 | 222251 | 1646 | 1661 | CACTAGAATAGCCCAT | 17 | AK | 1001 |
| 1441865 | 82198 | 82213 | N/A | N/A | TATTAGCTCATGGAAA | 12 | AK | 2091 |
| 1441869 | 229160 | 229175 | N/A | N/A | AGTATTAACCACCATT | 11 | AK | 2535 |
| 1441870 | 463911 | 463926 | N/A | N/A | TGTCAGATTTAATAGG | 25 | AK | 2972 |
| 1441876 | 331863 | 331878 | N/A | N/A | TATAGTATGATAGCAC | 3 | AK | 1607 |
| 1441879 | 331860 | 331875 | N/A | N/A | AGTATGATAGCACAAA | 6 | AK | 2539 |
| 1441882 | 236802 | 236817 | N/A | N/A | ATTGTTATACTGATGG | 6 | AK | 2542 |
| 1441885 | 236799 | 236814 | N/A | N/A | GTTATACTGATGGGCT | 14 | AK | 2544 |
| 1441889 | 217511 | 217526 | 477 | 492 | GGCTGTAAACTTTGTT | 11 | AK | 2816 |
| 1441892 | 217564 | 217579 | 530 | 545 | CGGAAATGATTCTGGC | 24 | AK | 2161 |
| 1441896 | 561179 | 561194 | 10168 | 10183 | GAATTGAAGTTAGGGT | 15 | AK | 134 |
| 1441899 | 222017 | 222032 | 1427 | 1442 | TTTCAAACTGGGAGCT | 37 | AK | 2548 |
| 1441256 | 288681 | 288696 | 2076 | 2091 | TATCTATTGGAGAAGT | 3 | AL | 1013 |
| 1441259 | 288678 | 288693 | 2073 | 2088 | CTATTGGAGAAGTGTA | 2 | AL | 936 |
| 1441261 | 217667 | 217682 | 633 | 648 | CTCTGTGTTTTACGAC | 9 | AL | 2941 |
| 1441264 | 217664 | 217679 | 630 | 645 | TGTGTTTTACGACTGG | 16 | AL | 858 |
| 1441267 | 217661 | 217676 | 627 | 642 | GTTTTACGACTGGCAG | 7 | AL | 21 |
| 1441271 | 218082 | 218097 | 1048 | 1063 | TATAGGATGCTGGGTC | 18 | AL | 100 |
| 1441274 | 218079 | 218094 | 1045 | 1060 | AGGATGCTGGGTCTCT | 12 | AL | 397 |
| 1441278 | 235208 | 235223 | N/A | N/A | ACACAATTTAGCTCTA | 4 | AL | 341 |
| 1441281 | 288675 | 288690 | 2070 | 2085 | TTGGAGAAGTGTATTA | 6 | AL | 352 |
| 1441283 | 82207 | 82222 | N/A | N/A | ACTTTCAGATATTAGC | 4 | AL | 3009 |
| 1441286 | 226034 | 226049 | N/A | N/A | AACCTCTTGCACCTTT | 18 | AL | 3010 |
| 1441290 | 217743 | 217758 | 709 | 724 | TTCCTCCGTTGTTACT | 15 | AL | 3011 |
| 1441293 | 217740 | 217755 | 706 | 721 | CTCCGTTGTTACTTCA | 5 | AL | 2945 |
| 1441297 | 218105 | 218120 | 1071 | 1086 | CTTTGCAGTGATGTCT | 10 | AL | 2861 |
| 1441300 | 218102 | 218117 | 1068 | 1083 | TGCAGTGATGTCTCAA | 11 | AL | 2822 |
| 1441303 | 218224 | 218239 | 1190 | 1205 | GAGCTTTCCAGGATTC | 23 | AL | 3012 |
| 1441306 | 218219 | 218234 | 1185 | 1200 | TTCCAGGATTCATCCC | 10 | AL | 2948 |
| 1441307 | 222175 | 222190 | 1585 | 1600 | TCCCCCTGATGTCCTC | 16 | AL | 2949 |
| 1441311 | 222149 | 222164 | 1559 | 1574 | GACCACCTTCTTTAAT | 12 | AL | 2491 |
| 1441314 | 244766 | 244781 | N/A | N/A | AGGTAATTTATGAGTT | 13 | AL | 488 |
| 1441319 | 342926 | 342941 | N/A | N/A | GATAATGTGAAGCTTA | 14 | AL | 417 |
| 1441322 | 366242 | 366257 | N/A | N/A | CTATCATATGAAAGCC | 18 | AL | 2476 |
| 1441326 | 181930 | 181945 | N/A | N/A | GCAGAATTGATAACAG | 12 | AL | 562 |
| 1441329 | 365700 | 365715 | N/A | N/A | CAGTAATATTAAAGCC | 7 | AL | 2480 |
| 1441332 | 508291 | 508306 | N/A | N/A | GTGATTTTAAGAGTCC | 44 | AL | 3013 |
| 1441335 | 508286 | 508301 | N/A | N/A | TTTAAGAGTCCACTAG | 85 | AL | 2482 |
| 1441336 | 222040 | 222055 | 1450 | 1465 | TAAAGAAGTGTTGTCC | 5 | AL | 2483 |
| 1441339 | 222037 | 222052 | 1447 | 1462 | AGAAGTGTTGTCCAAA | 3 | AL | 2953 |
| 1441342 | 155903 | 155918 | N/A | N/A | AAGTTATTATATGGCT | 69 | AL | 2484 |
| 1441345 | 251926 | 251941 | N/A | N/A | GGTTTTAAGTTATCTC | 7 | AL | 2486 |
| 1441347 | 229866 | 229881 | N/A | N/A | CTCAATATTGTGTGTC | 23 | AL | 609 |
| 1441351 | N/A | N/A | 2003 | 2018 | AATACCTGAGTGACTG | 5 | AL | 2487 |
| 1441354 | 222160 | 222175 | 1570 | 1585 | CTCCAAGAACTGACCA | 6 | AL | 546 |
| 1441357 | 222157 | 222172 | 1567 | 1582 | CAAGAACTGACCACCT | 3 | AL | 2472 |
| 1441583 | 263008 | 263023 | N/A | N/A | GTGATATGAATGGTAT | 1 | AL | 1090 |
| | 263049 | 263064 | | | | | | |
| 1441587 | 218085 | 218100 | 1051 | 1066 | ATCTATAGGATGCTGG | 16 | AL | 781 |
| 1441589 | 225078 | 225093 | N/A | N/A | CGTGTGTATTATTGAC | 3 | AL | 363 |
| 1441592 | 225075 | 225090 | N/A | N/A | GTGTATTATTGACCTG | 6 | AL | 630 |
| 1441595 | 225072 | 225087 | N/A | N/A | TATTATTGACCTGGTA | 45 | AL | 476 |
| 1441597 | 222234 | 222249 | 1644 | 1659 | CTAGAATAGCCCATCA | 6 | AL | 848 |
| 1441600 | 222231 | 222246 | 1641 | 1656 | GAATAGCCCATCACGA | 5 | AL | 2520 |
| 1441605 | 218173 | 218188 | 1139 | 1154 | ACAAACCAGCTGATGA | 20 | AL | 2524 |
| 1441608 | 218170 | 218185 | 1136 | 1151 | AACCAGCTGATGAGAT | 4 | AL | 2525 |
| 1441611 | 263335 | 263350 | N/A | N/A | GTTTGAAGAATGCATG | 16 | AL | 2526 |
| 1441613 | 344740 | 344755 | N/A | N/A | TTAGTATCCTTCAATG | 3 | AL | 3014 |
| 1441616 | 391182 | 391197 | N/A | N/A | TTAGGATTAAGGAGTT | 6 | AL | 2530 |
| 1441619 | 391179 | 391194 | N/A | N/A | GGATTAAGGAGTTCTG | 33 | AL | 2532 |
| 1441623 | 229903 | 229918 | N/A | N/A | CATTTAGAGGCATTGC | 28 | AL | 737 |
| 1441627 | 97754 | 97769 | N/A | N/A | GTCTCATTAAATCAAG | 8 | AL | 2920 |
| 1441630 | 97751 | 97766 | N/A | N/A | TCATTAAATCAAGGCA | 14 | AL | 2501 |
| 1441632 | 350508 | 350523 | N/A | N/A | TTATTATAGGGTTGAA | 5 | AL | 2502 |
| 1441634 | 290657 | 290672 | 2136 | 2151 | GCACAGGTAAGGCAAT | 57 | AL | 784 |
| 1441637 | 290651 | 290666 | 2130 | 2145 | GTAAGGCAATGGACTC | 11 | AL | 2962 |
| 1441639 | 233649 | 233664 | N/A | N/A | GCTCATTAAGTTCTTC | 20 | AL | 870 |
| 1441642 | 82462 | 82477 | N/A | N/A | ACAATGCTGATTCAGG | 7 | AL | 2507 |
| 1441646 | 368429 | 368444 | N/A | N/A | GTGATATTGTATAAGG | 2 | AL | 3015 |
| 1441649 | 368425 | 368440 | N/A | N/A | TATTGTATAAGGTTAG | 2 | AL | 2510 |
| 1441652 | 242391 | 242406 | N/A | N/A | CCGTCAAGTAATGAGT | 29 | AL | 2966 |
| 1441656 | 285253 | 285268 | 1888 | 1903 | TCTTTTGAATCTGTCC | 4 | AL | 2514 |
| 1441659 | 285188 | 285203 | 1823 | 1838 | TGGTACCATTACTGAG | 57 | AL | 2515 |
| 1441662 | 285185 | 285200 | 1820 | 1835 | TACCATTACTGAGATT | 11 | AL | 616 |
| 1441665 | 217790 | 217805 | 756 | 771 | CCAGTTAACAGCGCGG | 69 | AL | 178 |
| 1441668 | 217787 | 217802 | 753 | 768 | GTTAACAGCGCGGTGA | 17 | AL | 2518 |
| 1441864 | 82200 | 82215 | N/A | N/A | GATATTAGCTCATGGA | 5 | AL | 223 |
| 1441866 | 218034 | 218049 | 1000 | 1015 | CACTCCTTGAAATTCC | 13 | AL | 2928 |
| 1441868 | 229161 | 229176 | 478 | 493 | AAGTATTAACCACCAT | 4 | AL | 1913 |
| 1441872 | 463907 | 463922 | N/A | N/A | AGATTTAATAGGTCTT | 100 | AL | 2536 |
| 1441873 | 184997 | 185012 | N/A | N/A | GTGTATTAGGTTTTTC | 18 | AL | 1840 |
| 1441875 | 331864 | 331879 | N/A | N/A | CTATAGTATGATAGCA | 88 | AL | 2537 |
| 1441878 | 331861 | 331876 | N/A | N/A | TAGTATGATAGCACAA | 2 | AL | 2538 |
| 1441881 | 236803 | 236818 | N/A | N/A | AATTGTTATACTGATG | 5 | AL | 2541 |
| 1441884 | 236800 | 236815 | N/A | N/A | TGTTATACTGATGGGC | 31 | AL | 1304 |
| 1441887 | 236797 | 236812 | N/A | N/A | TATACTGATGGGCTAG | 28 | AL | 2546 |
| 1441888 | 217512 | 217527 | N/A | N/A | GGGCTGTAAACTTTGT | 11 | AL | 3016 |
| 1441891 | 217565 | 217580 | 531 | 546 | CCGGAAATGATTCTGG | 63 | AL | 2238 |
| 1441895 | 561180 | 561195 | 10169 | 10184 | GGAATTGAAGTTAGGG | 20 | AL | 212 |
| 1441898 | 222018 | 222033 | 1428 | 1443 | GTTTCAAACTGGGAGC | 59 | AL | 2975 |
| 1441255 | 288682 | 288697 | 2077 | 2092 | ATATCTATTGGAGAAG | 5 | AM | 1091 |
| 1441258 | 288679 | 288694 | 2074 | 2089 | TCTATTGGAGAAGTGT | 5 | AM | 181 |
| 1441263 | 217665 | 217680 | 631 | 646 | CTGTGTTTTACGACTG | 9 | AM | 2896 |
| 1441266 | 217662 | 217677 | 628 | 643 | TGTTTTACGACTGGCA | 8 | AM | 705 |
| 1441270 | 218083 | 218098 | 1049 | 1064 | CTATAGGATGCTGGGT | 41 | AM | 628 |
| 1441273 | 218080 | 218095 | 1046 | 1061 | TAGGATGCTGGGTCTC | 11 | AM | 474 |
| 1441277 | 235209 | 235224 | N/A | N/A | TACACAATTTAGCTCT | 17 | AM | 152 |
| | 235282 | 235297 | | | | | | |
| 1441280 | 288676 | 288691 | 2071 | 2086 | ATTGGAGAAGTGTATT | 3 | AM | 783 |
| 1441285 | 226035 | 226050 | N/A | N/A | CAACCTCTTGCACCTT | 45 | AM | 2858 |
| 1441288 | 226032 | 226047 | N/A | N/A | CCTCTTGCACCTTTCT | 6 | AM | 3017 |
| 1441289 | 217744 | 217759 | 710 | 725 | TTTCCTCCGTTGTTAC | 18 | AM | 2944 |
| 1441292 | 217741 | 217756 | 707 | 722 | CCTCCGTTGTTACTTC | 16 | AM | 2601 |
| 1441295 | 217738 | 217753 | 704 | 719 | CCGTTGTTACTTCAGC | 6 | AM | 3018 |
| 1441296 | 218106 | 218121 | 1072 | 1087 | TCTTTGCAGTGATGTC | 9 | AM | 3019 |
| 1441299 | 218103 | 218118 | 1069 | 1084 | TTGCAGTGATGTCTCA | 11 | AM | 2606 |
| 1441302 | 218225 | 218240 | 1191 | 1206 | GGAGCTTTCCAGGATT | 21 | AM | 2947 |
| 1441305 | 218221 | 218236 | 1187 | 1202 | CTTTCCAGGATTCATC | 7 | AM | 2862 |
| 1441310 | 222154 | 222169 | 1564 | 1579 | GAACTGACCACCTTCT | 10 | AM | 2490 |
| 1441313 | 244768 | 244783 | N/A | N/A | ATAGGTAATTTATGAG | 74 | AM | 2492 |
| 1441317 | 342928 | 342943 | N/A | N/A | GAGATAATGTGAAGCT | 4 | AM | 2494 |
| 1441321 | 366243 | 366258 | N/A | N/A | ACTATCATATGAAAGC | 25 | AM | 2475 |
| 1441325 | 181931 | 181946 | N/A | N/A | TGCAGAATTGATAACA | 69 | AM | 2864 |
| 1441328 | 365701 | 365716 | N/A | N/A | GCAGTAATATTAAAGC | 8 | AM | 2479 |
| 1441331 | 508292 | 508307 | N/A | N/A | GGTGATTTTAAGAGTC | 21 | AM | 2952 |
| 1441334 | 508287 | 508302 | N/A | N/A | TTTTAAGAGTCCACTA | 32 | AM | 2481 |
| 1441338 | 222038 | 222053 | 1448 | 1463 | AAGAAGTGTTGTCCAA | 4 | AM | 2866 |
| 1441341 | 155904 | 155919 | N/A | N/A | GAAGTTATTATATGGC | 6 | AM | 530 |
| 1441344 | 155901 | 155916 | N/A | N/A | GTTATTATATGGCTGT | 35 | AM | 2485 |
| 1441346 | 229868 | 229883 | N/A | N/A | ATCTCAATATTGTGTG | 5 | AM | 2956 |
| 1441350 | N/A | N/A | 2005 | 2020 | GAAATACCTGAGTGAC | 6 | AM | 462 |
| 1441353 | 222162 | 222177 | 1572 | 1587 | CTCTCCAAGAACTGAC | 6 | AM | 554 |
| 1441356 | 222158 | 222173 | 1568 | 1583 | CCAAGAACTGACCACC | 14 | AM | 2870 |
| 1441582 | 263009 | 263024 | N/A | N/A | AGTGATATGAATGGTA | 2 | AM | 153 |
| | 263050 | 263065 | | | | | | |
| 1441585 | 263006 | 263021 | N/A | N/A | GATATGAATGGTATGA | 4 | AM | 935 |
| | 263047 | 263062 | | | | | | |
| 1441586 | 218086 | 218101 | 1052 | 1067 | AATCTATAGGATGCTG | 27 | AM | 2496 |
| 1441588 | 217659 | 217674 | 625 | 640 | TTTACGACTGGCAGTG | 30 | AM | 552 |
| 1441591 | 225076 | 225091 | N/A | N/A | TGTGTATTATTGACCT | 2 | AM | 706 |
| 1441594 | 225073 | 225088 | N/A | N/A | GTATTATTGACCTGGT | 28 | AM | 229 |
| 1441596 | 222235 | 222250 | 1645 | 1660 | ACTAGAATAGCCCATC | 9 | AM | 922 |
| 1441599 | 222232 | 222247 | 1642 | 1657 | AGAATAGCCCATCACG | 24 | AM | 631 |
| 1441602 | 222229 | 222244 | 1639 | 1654 | ATAGCCCATCACGATG | 32 | AM | 2916 |
| 1441604 | 218174 | 218189 | 1140 | 1155 | CACAAACCAGCTGATG | 10 | AM | 2523 |
| 1441607 | 218171 | 218186 | 1137 | 1152 | AAACCAGCTGATGAGA | 9 | AM | 2959 |
| 1441610 | 263338 | 263353 | N/A | N/A | GAAGTTTGAAGAATGC | 7 | AM | 949 |
| 1441612 | 344746 | 344761 | N/A | N/A | CTAAATTTAGTATCCT | 13 | AM | 2527 |
| 1441615 | 391183 | 391198 | N/A | N/A | ATTAGGATTAAGGAGT | 11 | AM | 2529 |
| 1441618 | 391180 | 391195 | N/A | N/A | AGGATTAAGGAGTTCT | 50 | AM | 2531 |
| 1441622 | 229904 | 229919 | N/A | N/A | ACATTTAGAGGCATTG | 2 | AM | 2497 |
| 1441626 | 222043 | 222058 | 1453 | 1468 | GTATAAAGAAGTGTTG | 2 | AM | 777 |
| 1441629 | 97752 | 97767 | N/A | N/A | CTCATTAAATCAAGGC | 28 | AM | 747 |
| 1441631 | 350509 | 350524 | N/A | N/A | TTTATTATAGGGTTGA | 3 | AM | 1053 |
| 1441636 | 290652 | 290667 | 2131 | 2146 | GGTAAGGCAATGGACT | 5 | AM | 2505 |
| 1441638 | 233651 | 233666 | N/A | N/A | CTGCTCATTAAGTTCT | 25 | AM | 3020 |
| 1441641 | 82464 | 82479 | N/A | N/A | GAACAATGCTGATTCA | 65 | AM | 955 |
| 1441644 | 82460 | 82475 | N/A | N/A | AATGCTGATTCAGGCA | 18 | AM | 2964 |
| 1441645 | 368430 | 368445 | N/A | N/A | GGTGATATTGTATAAG | 4 | AM | 2508 |
| 1441648 | 368427 | 368442 | N/A | N/A | GATATTGTATAAGGTT | 3 | AM | 1060 |
| 1441651 | 242392 | 242407 | N/A | N/A | ACCGTCAAGTAATGAG | 43 | AM | 3021 |
| 1441654 | 242389 | 242404 | N/A | N/A | GTCAAGTAATGAGTTT | 12 | AM | 758 |
| 1441655 | 285255 | 285270 | 1890 | 1905 | GATCTTTTGAATCTGT | 21 | AM | 2513 |
| 1441658 | 285251 | 285266 | 1886 | 1901 | TTTTGAATCTGTCCAG | 13 | AM | 2968 |
| 1441661 | 285186 | 285201 | 1821 | 1836 | GTACCATTACTGAGAT | 14 | AM | 2969 |
| 1441664 | 217791 | 217806 | 757 | 772 | TCCAGTTAACAGCGCG | 63 | AM | 2600 |
| 1441667 | 217788 | 217803 | 754 | 769 | AGTTAACAGCGCGGTG | 25 | AM | 2517 |
| 1441862 | 218077 | 218092 | 1043 | 1058 | GATGCTGGGTCTCTCT | 7 | AM | 381 |
| 1441863 | 82201 | 82216 | N/A | N/A | AGATATTAGCTCATGG | 19 | AM | 2246 |
| 1441867 | 229163 | 229178 | N/A | N/A | TAAAGTATTAACCACC | 8 | AM | 1964 |
| 1441871 | 463910 | 463925 | N/A | N/A | GTCAGATTTAATAGGT | 26 | AM | 2929 |
| 1441874 | 331865 | 331880 | N/A | N/A | ACTATAGTATGATAGC | 14 | AM | 1644 |
| 1441877 | 331862 | 331877 | N/A | N/A | ATAGTATGATAGCACA | 3 | AM | 1533 |
| 1441880 | 331859 | 331874 | N/A | N/A | GTATGATAGCACAAAC | 6 | AM | 2540 |
| 1441883 | 236801 | 236816 | N/A | N/A | TTGTTATACTGATGGG | 4 | AM | 2543 |
| 1441886 | 236798 | 236813 | N/A | N/A | TTATACTGATGGGCTA | 31 | AM | 2545 |
| 1441890 | 217510 | 217525 | 476 | 491 | GCTGTAAACTTTGTTC | 7 | AM | 2547 |
| 1441893 | 217563 | 217578 | 529 | 544 | GGAAATGATTCTGGCT | 15 | AM | 2973 |
| 1441894 | 561183 | 561198 | 10172 | 10187 | TCAGGAATTGAAGTTA | 49 | AM | 2974 |
| 1441897 | 222019 | 222034 | 1429 | 1444 | GGTTTCAAACTGGGAG | 28 | AM | 3022 |
| 1441900 | 222013 | 222028 | 1423 | 1438 | AAACTGGGAGCTGTAC | 12 | AU | 2534 |
| 1441991 | 218076 | 218091 | 1042 | 1057 | ATGCTGGGTCTCTCTC | 19 | AU | 3023 |
| 1441992 | 235212 | 235227 | N/A | N/A | TTATACACAATTTAGC | 2 | AU | 334 |
| | 235285 | 235300 | | | | | | |
| 1441993 | 226037 | 226052 | N/A | N/A | CCCAACCTCTTGCACC | 81 | AU | 2549 |
| 1441994 | 217746 | 217761 | 712 | 727 | ACTTTCCTCCGTTGTT | 32 | AU | 3024 |
| 1441995 | 217736 | 217751 | 702 | 717 | GTTGTTACTTCAGCTG | 25 | AU | 3025 |
| 1441996 | 218108 | 218123 | 1074 | 1089 | GTTCTTTGCAGTGATG | 5 | AU | 3026 |
| 1441997 | 218098 | 218113 | 1064 | 1079 | GTGATGTCTCAAAATC | 10 | AU | 3027 |
| 1441998 | 218217 | 218232 | 1183 | 1198 | CCAGGATTCATCCCAA | 22 | AU | 2936 |
| 1441999 | 222177 | 222192 | 1587 | 1602 | CCTCCCCCTGATGTCC | 53 | AU | 2893 |
| 1442000 | 222147 | 222162 | 1557 | 1572 | CCACCTTCTTTAATGC | 15 | AU | 347 |
| 1442001 | 342921 | 342936 | N/A | N/A | TGTGAAGCTTAGAACC | 3 | AU | 2937 |
| 1442002 | 508284 | 508299 | N/A | N/A | TAAGAGTCCACTAGCC | 66 | AU | 2550 |
| 1442003 | 181922 | 181937 | N/A | N/A | GATAACAGGTAAATTA | 73 | AU | 2894 |
| 1442004 | 244760 | 244775 | N/A | N/A | TTTATGAGTTAAAGGG | 13 | AU | 2447 |
| 1442005 | 229860 | 229875 | N/A | N/A | ATTGTGTGTCTCAGGC | 10 | AU | 3028 |
| 1442006 | 285147 | 285162 | 1782 | 1797 | ATTTCAGTGCTCCCCA | 21 | AU | 2980 |
| 1442007 | 285466 | 285481 | 2000 | 2015 | ACCTGAGTGACTGATC | 9 | AU | 2981 |
| 1442049 | 217669 | 217684 | 635 | 650 | CTCTCTGTGTTTTACG | 6 | AU | 2935 |
| 1442050 | 217668 | 217683 | 634 | 649 | TCTCTGTGTTTTACGA | 4 | AU | 3029 |
| 1442051 | 217658 | 217673 | 624 | 639 | TTACGACTGGCAGTGT | 19 | AU | 475 |
| 1442052 | 217657 | 217672 | 623 | 638 | TACGACTGGCAGTGTC | 11 | AU | 2982 |
| 1442053 | 225070 | 225085 | N/A | N/A | TTATTGACCTGGTAAA | 84 | AU | 2400 |
| 1442054 | 222237 | 222252 | 1647 | 1662 | CCACTAGAATAGCCCA | 19 | AU | 2551 |
| 1442055 | 222227 | 222242 | 1637 | 1652 | AGCCCATCACGATGCC | 25 | AU | 2984 |
| 1442056 | 326723 | 326738 | N/A | N/A | GATTATGAGGAAACCT | 28 | AU | 2552 |
| 1442057 | 263333 | 263348 | N/A | N/A | TTGAAGAATGCATGTC | 14 | AU | 2554 |
| 1442058 | 344738 | 344753 | N/A | N/A | AGTATCCTTCAATGGC | 20 | AU | 3030 |
| 1442059 | 391186 | 391201 | N/A | N/A | TTAATTAGGATTAAGG | 63 | AU | 2555 |
| 1442060 | 391176 | 391191 | N/A | N/A | TTAAGGAGTTCTGTGT | 16 | AU | 2556 |
| 1442061 | 229900 | 229915 | N/A | N/A | TTAGAGGCATTGCAGG | 20 | AU | 2557 |
| 1442062 | 222051 | 222066 | 1461 | 1476 | GCACTGTAGTATAAAG | 6 | AU | 3031 |
| 1442063 | 350504 | 350519 | N/A | N/A | TATAGGGTTGAAAATA | 95 | AU | 2558 |
| 1442064 | 290659 | 290674 | 2138 | 2153 | TTGCACAGGTAAGGCA | 16 | AU | 2622 |
| 1442065 | 290649 | 290664 | 2128 | 2143 | AAGGCAATGGACTCCA | 29 | AU | 2837 |
| 1442066 | 233653 | 233668 | N/A | N/A | AGCTGCTCATTAAGTT | 68 | AU | 2989 |
| 1442067 | 82458 | 82473 | N/A | N/A | TGCTGATTCAGGCAGT | 88 | AU | 2990 |
| 1442068 | 368422 | 368437 | N/A | N/A | TGTATAAGGTTAGGTG | 3 | AU | 2559 |
| 1442069 | 242394 | 242409 | N/A | N/A | GTACCGTCAAGTAATG | 34 | AU | 2992 |
| 1442070 | 285249 | 285264 | 1884 | 1899 | TTGAATCTGTCCAGCT | 10 | AU | 2993 |
| 1442071 | 217794 | 217809 | 760 | 775 | GTCTCCAGTTAACAGC | 30 | AU | 2994 |
| 1442072 | 217784 | 217799 | 750 | 765 | AACAGCGCGGTGAGAT | 21 | AU | 2995 |
| 1442073 | 222238 | 222253 | 1648 | 1663 | GCCACTAGAATAGCCC | 39 | AU | 2560 |
| 1442074 | 222228 | 222243 | 1638 | 1653 | TAGCCCATCACGATGC | 29 | AU | 2996 |
| 1442132 | 263003 | 263018 | N/A | N/A | ATGAATGGTATGATGG | 7 | AU | 2553 |
| 1442133 | 222021 | 222036 | 1431 | 1446 | ATGGTTTCAAACTGGG | 15 | AU | 2564 |
| 1442156 | 82196 | 82211 | N/A | N/A | TTAGCTCATGGAAAGC | 29 | AU | 2997 |
| 1442157 | 229158 | 229173 | N/A | N/A | TATTAACCACCATTCC | 7 | AU | 2561 |
| 1442158 | 185002 | 185017 | N/A | N/A | GCACTGTGTATTAGGT | 8 | AU | 3032 |
| 1442159 | 331857 | 331872 | N/A | N/A | ATGATAGCACAAACCA | 5 | AU | 3033 |
| 1442160 | 236795 | 236810 | N/A | N/A | TACTGATGGGCTAGCC | 105 | AU | 2562 |
| 1442161 | 217514 | 217529 | 480 | 495 | ATGGGCTGTAAACTTT | 9 | AU | 3000 |
| 1442162 | 217513 | 217528 | 479 | 494 | TGGGCTGTAAACTTTG | 6 | AU | 3001 |
| 1442163 | 217567 | 217582 | 533 | 548 | TTCCGGAAATGATTCT | 19 | AU | 2563 |

[0474] The modified oligonucleotides in the Table 5 below are 16 nucleosides in length. The sugar motif for the modified oligonucleotides is (from 5′ to 3′): kkkdddddddddkkke; wherein each “d” represents a 2′-β-D-deoxyribosyl sugar moiety, each “k” represents a cEt modified sugar moiety, and each “e” represents a 2′-MOE sugar moiety. The internucleoside linkage motif for the modified oligonucleotides is (from 5′ to 3′): sssssssssssssss; wherein each “s” represents a phosphorothioate internucleoside linkage. Each cytosine residue is a 5-methylcytosine.

TABLE 5
Reduction of PSD3 RNA by mixed cEt/MOE modified oligonucleotides
with uniform phosphorothioate internucleoside linkages

| | SEQ ID | SEQ ID | SEQ ID | SEQ ID | | DMPK | | |
|---|---|---|---|---|---|---|---|---|
| Compound | NO: 1 | NO: 1 | NO: 2 | NO: 2 | | (% UTC) | | SEQ |
| No. | Start Site | Stop Site | Start Site | Stop Site | Sequence (5′ to 3′) | RTS41435 | AID | ID NO |
| 1441358 | 288683 | 288698 | 2078 | 2093 | AATATCTATTGGAGAA | 9 | AN | 1168 |
| 1441361 | 288680 | 288695 | 2075 | 2090 | ATCTATTGGAGAAGTG | 3 | AN | 260 |
| 1441364 | 288677 | 288692 | 2072 | 2087 | TATTGGAGAAGTGTAT | 3 | AN | 859 |
| 1441366 | 217666 | 217681 | 632 | 647 | TCTGTGTTTTACGACT | 8 | AN | 346 |
| 1441369 | 217663 | 217678 | 629 | 644 | GTGTTTTACGACTGGC | 4 | AN | 782 |
| 1441372 | 217660 | 217675 | 626 | 641 | TTTTACGACTGGCAGT | 23 | AN | 629 |
| 1441373 | 218084 | 218099 | 1050 | 1065 | TCTATAGGATGCTGGG | 15 | AN | 704 |
| 1441376 | 218081 | 218096 | 1047 | 1062 | ATAGGATGCTGGGTCT | 8 | AN | 551 |
| 1441379 | 218078 | 218093 | 1044 | 1059 | GGATGCTGGGTCTCTC | 5 | AN | 2855 |
| 1441380 | 235210 | 235225 | N/A | N/A | ATACACAATTTAGCTC | 13 | AN | 337 |
| | 235283 | 235298 | | | | | | |
| 1441383 | 235205 | 235220 | N/A | N/A | CAATTTAGCTCTATTA | 39 | AN | 2489 |
| 1441386 | 288674 | 288689 | 2069 | 2084 | TGGAGAAGTGTATTAA | 3 | AN | 350 |
| 1441388 | 82202 | 82217 | N/A | N/A | CAGATATTAGCTCATG | 4 | AN | 2324 |
| 1441391 | 226033 | 226048 | N/A | N/A | ACCTCTTGCACCTTTC | 5 | AN | 2898 |
| 1441395 | 217742 | 217757 | 708 | 723 | TCCTCCGTTGTTACTT | 13 | AN | 2859 |
| 1441398 | 217739 | 217754 | 705 | 720 | TCCGTTGTTACTTCAG | 5 | AN | 3003 |
| 1441402 | 218104 | 218119 | 1070 | 1085 | TTTGCAGTGATGTCTC | 7 | AN | 2946 |
| 1441405 | 218101 | 218116 | 1067 | 1082 | GCAGTGATGTCTCAAA | 13 | AN | 3004 |
| 1441408 | 218222 | 218237 | 1188 | 1203 | GCTTTCCAGGATTCAT | 7 | AN | 3005 |
| 1441412 | 222169 | 222184 | 1579 | 1594 | TGATGTCCTCTCCAAG | 4 | AN | 2904 |
| 1441413 | 222155 | 222170 | 1565 | 1580 | AGAACTGACCACCTTC | 5 | AN | 2905 |
| 1441416 | 244769 | 244784 | N/A | N/A | TATAGGTAATTTATGA | 85 | AN | 653 |
| 1441419 | 244765 | 244780 | N/A | N/A | GGTAATTTATGAGTTA | 6 | AN | 455 |
| 1441420 | 342929 | 342944 | N/A | N/A | TGAGATAATGTGAAGC | 2 | AN | 2493 |
| 1441423 | 342925 | 342940 | N/A | N/A | ATAATGTGAAGCTTAG | 4 | AN | 2495 |
| 1441426 | 366241 | 366256 | N/A | N/A | TATCATATGAAAGCCA | 3 | AN | 2477 |
| 1441427 | 181932 | 181947 | N/A | N/A | ATGCAGAATTGATAAC | 70 | AN | 2478 |
| 1441430 | 181927 | 181942 | N/A | N/A | GAATTGATAACAGGTA | 2 | AN | 449 |
| 1441433 | 365698 | 365713 | N/A | N/A | GTAATATTAAAGCCAG | 2 | AN | 441 |
| 1441436 | 508289 | 508304 | N/A | N/A | GATTTTAAGAGTCCAC | 16 | AN | 444 |
| 1441440 | 222039 | 222054 | 1449 | 1464 | AAAGAAGTGTTGTCCA | 2 | AN | 526 |
| 1441443 | 222036 | 222051 | 1446 | 1461 | GAAGTGTTGTCCAAAA | 1 | AN | 3006 |
| 1441446 | 155902 | 155917 | N/A | N/A | AGTTATTATATGGCTG | 34 | AN | 414 |
| 1441451 | 229862 | 229877 | N/A | N/A | ATATTGTGTGTCTCAG | 4 | AN | 3007 |
| 1441452 | 285149 | 285164 | 1784 | 1799 | AAATTTCAGTGCTCCC | 6 | AN | 2278 |
| 1441455 | 285468 | 285483 | 2002 | 2017 | ATACCTGAGTGACTGA | 2 | AN | 2488 |
| 1441458 | 222159 | 222174 | 1569 | 1584 | TCCAAGAACTGACCAC | 9 | AN | 469 |
| 1441671 | 263010 | 263025 | N/A | N/A | AAGTGATATGAATGGT | 2 | AN | 1167 |
| | 263051 | 263066 | | | | | | |
| 1441674 | 263007 | 263022 | N/A | N/A | TGATATGAATGGTATG | 4 | AN | 1012 |
| | 263048 | 263063 | | | | | | |
| 1441680 | 225077 | 225092 | N/A | N/A | GTGTGTATTATTGACC | 3 | AN | 2872 |
| 1441683 | 225074 | 225089 | N/A | N/A | TGTATTATTGACCTGG | 6 | AN | 553 |
| 1441688 | 222233 | 222248 | 1643 | 1658 | TAGAATAGCCCATCAC | 13 | AN | 779 |
| 1441691 | 222230 | 222245 | 1640 | 1655 | AATAGCCCATCACGAT | 22 | AN | 2521 |
| 1441693 | 218175 | 218190 | 1141 | 1156 | ACACAAACCAGCTGAT | 18 | AN | 2522 |
| 1441696 | 218172 | 218187 | 1138 | 1153 | CAAACCAGCTGATGAG | 15 | AN | 1097 |
| 1441699 | 218169 | 218184 | 1135 | 1150 | ACCAGCTGATGAGATG | 8 | AN | 2873 |
| 1441706 | 391184 | 391199 | N/A | N/A | AATTAGGATTAAGGAG | 18 | AN | 2528 |
| 1441709 | 391181 | 391196 | N/A | N/A | TAGGATTAAGGAGTTC | 23 | AN | 649 |
| 1441712 | 391178 | 391193 | N/A | N/A | GATTAAGGAGTTCTGT | 20 | AN | 2533 |
| 1441713 | 229906 | 229921 | N/A | N/A | GAACATTTAGAGGCAT | 2 | AN | 915 |
| 1441717 | 229902 | 229917 | N/A | N/A | ATTTAGAGGCATTGCA | 34 | AN | 2498 |
| 1441719 | 222047 | 222062 | 1457 | 1472 | TGTAGTATAAAGAAGT | 4 | AN | 2499 |
| 1441723 | 97753 | 97768 | N/A | N/A | TCTCATTAAATCAAGG | 24 | AN | 2500 |
| 1441728 | 350507 | 350522 | N/A | N/A | TATTATAGGGTTGAAA | 16 | AN | 2503 |
| 1441730 | 290653 | 290668 | 2132 | 2147 | AGGTAAGGCAATGGAC | 3 | AN | 2504 |
| 1441735 | 82465 | 82480 | N/A | N/A | TGAACAATGCTGATTC | 20 | AN | 2506 |
| 1441739 | 82461 | 82476 | N/A | N/A | CAATGCTGATTCAGGC | 3 | AN | 2877 |
| 1441743 | 368428 | 368443 | N/A | N/A | TGATATTGTATAAGGT | 4 | AN | 2509 |
| 1441746 | 368424 | 368439 | N/A | N/A | ATTGTATAAGGTTAGG | 3 | AN | 2511 |
| 1441749 | 242390 | 242405 | N/A | N/A | CGTCAAGTAATGAGTT | 15 | AN | 2512 |
| 1441753 | 285252 | 285267 | 1887 | 1902 | CTTTTGAATCTGTCCA | 5 | AN | 3008 |
| 1441756 | 285187 | 285202 | 1822 | 1837 | GGTACCATTACTGAGA | 47 | AN | 2881 |
| 1441759 | 217792 | 217807 | 758 | 773 | CTCCAGTTAACAGCGC | 46 | AN | 2516 |
| 1441762 | 217789 | 217804 | 755 | 770 | CAGTTAACAGCGCGGT | 15 | AN | 1241 |
| 1441765 | 217786 | 217801 | 752 | 767 | TTAACAGCGCGGTGAG | 17 | AN | 2519 |
| 1441766 | 222236 | 222251 | 1646 | 1661 | CACTAGAATAGCCCAT | 4 | AN | 1001 |
| 1441904 | 82198 | 82213 | N/A | N/A | TATTAGCTCATGGAAA | 23 | AN | 2091 |
| 1441908 | 229160 | 229175 | N/A | N/A | AGTATTAACCACCATT | 3 | AN | 2535 |
| 1441909 | 463911 | 463926 | N/A | N/A | TGTCAGATTTAATAGG | 39 | AN | 2972 |
| 1441915 | 331863 | 331878 | N/A | N/A | TATAGTATGATAGCAC | 4 | AN | 1607 |
| 1441918 | 331860 | 331875 | N/A | N/A | AGTATGATAGCACAAA | 7 | AN | 2539 |
| 1441921 | 236802 | 236817 | N/A | N/A | ATTGTTATACTGATGG | 4 | AN | 2542 |
| 1441924 | 236799 | 236814 | N/A | N/A | GTTATACTGATGGGCT | 14 | AN | 2544 |
| 1441928 | 217511 | 217526 | 477 | 492 | GGCTGTAAACTTTGTT | 11 | AN | 2816 |
| 1441931 | 217564 | 217579 | 530 | 545 | CGGAAATGATTCTGGC | 31 | AN | 2161 |
| 1441935 | 561179 | 561194 | 10168 | 10183 | GAATTGAAGTTAGGGT | 10 | AN | 134 |
| 1441938 | 222017 | 222032 | 1427 | 1442 | TTTCAAACTGGGAGCT | 48 | AN | 2548 |
| 1441360 | 288681 | 288696 | 2076 | 2091 | TATCTATTGGAGAAGT | 3 | AO | 1013 |
| 1441363 | 288678 | 288693 | 2073 | 2088 | CTATTGGAGAAGTGTA | 2 | AO | 936 |
| 1441365 | 217667 | 217682 | 633 | 648 | CTCTGTGTTTTACGAC | 8 | AO | 2941 |
| 1441368 | 217664 | 217679 | 630 | 645 | TGTGTTTTACGACTGG | 17 | AO | 858 |
| 1441371 | 217661 | 217676 | 627 | 642 | GTTTTACGACTGGCAG | 14 | AO | 21 |
| 1441375 | 218082 | 218097 | 1048 | 1063 | TATAGGATGCTGGGTC | 16 | AO | 100 |
| 1441378 | 218079 | 218094 | 1045 | 1060 | AGGATGCTGGGTCTCT | 10 | AO | 397 |
| 1441382 | 235208 | 235223 | N/A | N/A | ACACAATTTAGCTCTA | 3 | AO | 341 |
| 1441385 | 288675 | 288690 | 2070 | 2085 | TTGGAGAAGTGTATTA | 4 | AO | 352 |
| 1441387 | 82207 | 82222 | N/A | N/A | ACTTTCAGATATTAGC | 8 | AO | 3009 |
| 1441390 | 226034 | 226049 | N/A | N/A | AACCTCTTGCACCTTT | 7 | AO | 3010 |
| 1441394 | 217743 | 217758 | 709 | 724 | TTCCTCCGTTGTTACT | 18 | AO | 3011 |
| 1441397 | 217740 | 217755 | 706 | 721 | CTCCGTTGTTACTTCA | 6 | AO | 2945 |
| 1441401 | 218105 | 218120 | 1071 | 1086 | CTTTGCAGTGATGTCT | 5 | AO | 2861 |
| 1441404 | 218102 | 218117 | 1068 | 1083 | TGCAGTGATGTCTCAA | 9 | AO | 2822 |
| 1441407 | 218224 | 218239 | 1190 | 1205 | GAGCTTTCCAGGATTC | 20 | AO | 3012 |
| 1441410 | 218219 | 218234 | 1185 | 1200 | TTCCAGGATTCATCCC | 31 | AO | 2948 |
| 1441411 | 222175 | 222190 | 1585 | 1600 | TCCCCCTGATGTCCTC | 14 | AO | 2949 |
| 1441415 | 222149 | 222164 | 1559 | 1574 | GACCACCTTCTTTAAT | 51 | AO | 2491 |
| 1441418 | 244766 | 244781 | 1450 | 1465 | AGGTAATTTATGAGTT | 8 | AO | 488 |
| 1441422 | 342926 | 342941 | 1447 | 1462 | GATAATGTGAAGCTTA | 3 | AO | 417 |
| 1441425 | 366242 | 366257 | 2003 | 2018 | CTATCATATGAAAGCC | 5 | AO | 2476 |
| 1441429 | 181930 | 181945 | N/A | N/A | GCAGAATTGATAACAG | 9 | AO | 562 |
| 1441432 | 365700 | 365715 | N/A | N/A | CAGTAATATTAAAGCC | 10 | AO | 2480 |
| 1441435 | 508291 | 508306 | N/A | N/A | GTGATTTTAAGAGTCC | 46 | AO | 3013 |
| 1441438 | 508286 | 508301 | N/A | N/A | TTTAAGAGTCCACTAG | 115 | AO | 2482 |
| 1441439 | 222040 | 222055 | N/A | N/A | TAAAGAAGTGTTGTCC | 2 | AO | 2483 |
| 1441442 | 222037 | 222052 | N/A | N/A | AGAAGTGTTGTCCAAA | 1 | AO | 2953 |
| 1441445 | 155903 | 155918 | N/A | N/A | AAGTTATTATATGGCT | 36 | AO | 2484 |
| 1441448 | 251926 | 251941 | N/A | N/A | GGTTTTAAGTTATCTC | 6 | AO | 2486 |
| 1441450 | 229866 | 229881 | N/A | N/A | CTCAATATTGTGTGTC | 23 | AO | 609 |
| 1441454 | N/A | N/A | N/A | N/A | AATACCTGAGTGACTG | 2 | AO | 2487 |
| 1441457 | 222160 | 222175 | 1570 | 1585 | CTCCAAGAACTGACCA | 17 | AO | 546 |
| 1441460 | 222157 | 222172 | 1567 | 1582 | CAAGAACTGACCACCT | 3 | AO | 2472 |
| 1441673 | 263008 | 263023 | N/A | N/A | GTGATATGAATGGTAT | 2 | AO | 1090 |
| | 263049 | 263064 | | | | | | |
| 1441677 | 218085 | 218100 | 1051 | 1066 | ATCTATAGGATGCTGG | 16 | AO | 781 |
| 1441679 | 225078 | 225093 | N/A | N/A | CGTGTGTATTATTGAC | 4 | AO | 363 |
| 1441682 | 225075 | 225090 | N/A | N/A | GTGTATTATTGACCTG | 7 | AO | 630 |
| 1441685 | 225072 | 225087 | N/A | N/A | TATTATTGACCTGGTA | 17 | AO | 476 |
| 1441687 | 222234 | 222249 | 1644 | 1659 | CTAGAATAGCCCATCA | 9 | AO | 848 |
| 1441690 | 222231 | 222246 | 1641 | 1656 | GAATAGCCCATCACGA | 13 | AO | 2520 |
| 1441695 | 218173 | 218188 | 1139 | 1154 | ACAAACCAGCTGATGA | 13 | AO | 2524 |
| 1441698 | 218170 | 218185 | 1136 | 1151 | AACCAGCTGATGAGAT | 8 | AO | 2525 |
| 1441703 | 263335 | 263350 | N/A | N/A | GTTTGAAGAATGCATG | 12 | AO | 2526 |
| 1441705 | 344740 | 344755 | N/A | N/A | TTAGTATCCTTCAATG | 10 | AO | 3014 |
| 1441708 | 391182 | 391197 | N/A | N/A | TTAGGATTAAGGAGTT | 6 | AO | 2530 |
| 1441711 | 391179 | 391194 | N/A | N/A | GGATTAAGGAGTTCTG | 41 | AO | 2532 |
| 1441716 | 229903 | 229918 | N/A | N/A | CATTTAGAGGCATTGC | 40 | AO | 737 |
| 1441721 | 97754 | 97769 | N/A | N/A | GTCTCATTAAATCAAG | 15 | AO | 2920 |
| 1441725 | 97751 | 97766 | N/A | N/A | TCATTAAATCAAGGCA | 5 | AO | 2501 |
| 1441727 | 350508 | 350523 | N/A | N/A | TTATTATAGGGTTGAA | 2 | AO | 2502 |
| 1441729 | 290657 | 290672 | 2136 | 2151 | GCACAGGTAAGGCAAT | 50 | AO | 784 |
| 1441732 | 290651 | 290666 | 2130 | 2145 | GTAAGGCAATGGACTC | 6 | AO | 2962 |
| 1441734 | 233649 | 233664 | N/A | N/A | GCTCATTAAGTTCTTC | 5 | AO | 870 |
| 1441738 | 82462 | 82477 | N/A | N/A | ACAATGCTGATTCAGG | 3 | AO | 2507 |
| 1441742 | 368429 | 368444 | N/A | N/A | GTGATATTGTATAAGG | 2 | AO | 3015 |
| 1441745 | 368425 | 368440 | N/A | N/A | TATTGTATAAGGTTAG | 4 | AO | 2510 |
| 1441748 | 242391 | 242406 | N/A | N/A | CCGTCAAGTAATGAGT | 5 | AO | 2966 |
| 1441752 | 285253 | 285268 | 1888 | 1903 | TCTTTTGAATCTGTCC | 3 | AO | 2514 |
| 1441755 | 285188 | 285203 | 1823 | 1838 | TGGTACCATTACTGAG | 45 | AO | 2515 |
| 1441758 | 285185 | 285200 | 1820 | 1835 | TACCATTACTGAGATT | 5 | AO | 616 |
| 1441761 | 217790 | 217805 | 756 | 771 | CCAGTTAACAGCGCGG | 21 | AO | 178 |
| 1441764 | 217787 | 217802 | 753 | 768 | GTTAACAGCGCGGTGA | 28 | AO | 2518 |
| 1441903 | 82200 | 82215 | N/A | N/A | GATATTAGCTCATGGA | 15 | AO | 223 |
| 1441905 | 218034 | 218049 | 1000 | 1015 | CACTCCTTGAAATTCC | 9 | AO | 2928 |
| 1441907 | 229161 | 229176 | N/A | N/A | AAGTATTAACCACCAT | 8 | AO | 1913 |
| 1441911 | 463907 | 463922 | N/A | N/A | AGATTTAATAGGTCTT | 116 | AO | 2536 |
| 1441912 | 184997 | 185012 | N/A | N/A | GTGTATTAGGTTTTTC | 10 | AO | 1840 |
| 1441914 | 331864 | 331879 | N/A | N/A | CTATAGTATGATAGCA | 23 | AO | 2537 |
| 1441917 | 331861 | 331876 | N/A | N/A | TAGTATGATAGCACAA | 2 | AO | 2538 |
| 1441920 | 236803 | 236818 | N/A | N/A | AATTGTTATACTGATG | 5 | AO | 2541 |
| 1441923 | 236800 | 236815 | N/A | N/A | TGTTATACTGATGGGC | 5 | AO | 1304 |
| 1441926 | 236797 | 236812 | N/A | N/A | TATACTGATGGGCTAG | 36 | AO | 2546 |
| 1441927 | 217512 | 217527 | 478 | 493 | GGGCTGTAAACTTTGT | 10 | AO | 3016 |
| 1441930 | 217565 | 217580 | 531 | 546 | CCGGAAATGATTCTGG | 72 | AO | 2238 |
| 1441934 | 561180 | 561195 | 10169 | 10184 | GGAATTGAAGTTAGGG | 11 | AO | 212 |
| 1441937 | 222018 | 222033 | 1428 | 1443 | GTTTCAAACTGGGAGC | 33 | AO | 2975 |
| 1441359 | 288682 | 288697 | 2077 | 2092 | ATATCTATTGGAGAAG | 5 | AP | 1091 |
| 1441362 | 288679 | 288694 | 2074 | 2089 | TCTATTGGAGAAGTGT | 4 | AP | 181 |
| 1441367 | 217665 | 217680 | 631 | 646 | CTGTGTTTTACGACTG | 12 | AP | 2896 |
| 1441370 | 217662 | 217677 | 628 | 643 | TGTTTTACGACTGGCA | 5 | AP | 705 |
| 1441374 | 218083 | 218098 | 1049 | 1064 | CTATAGGATGCTGGGT | 16 | AP | 628 |
| 1441377 | 218080 | 218095 | 1046 | 1061 | TAGGATGCTGGGTCTC | 10 | AP | 474 |
| 1441381 | 235209 | 235224 | N/A | N/A | TACACAATTTAGCTCT | 3 | AP | 152 |
| | 235282 | 235297 | | | | | | |
| 1441384 | 288676 | 288691 | 2071 | 2086 | ATTGGAGAAGTGTATT | 8 | AP | 783 |
| 1441389 | 226035 | 226050 | N/A | N/A | CAACCTCTTGCACCTT | 26 | AP | 2858 |
| 1441392 | 226032 | 226047 | N/A | N/A | CCTCTTGCACCTTTCT | 4 | AP | 3017 |
| 1441393 | 217744 | 217759 | 710 | 725 | TTTCCTCCGTTGTTAC | 13 | AP | 2944 |
| 1441396 | 217741 | 217756 | 707 | 722 | CCTCCGTTGTTACTTC | 6 | AP | 2601 |
| 1441399 | 217738 | 217753 | 704 | 719 | CCGTTGTTACTTCAGC | 4 | AP | 3018 |
| 1441400 | 218106 | 218121 | 1072 | 1087 | TCTTTGCAGTGATGTC | 4 | AP | 3019 |
| 1441403 | 218103 | 218118 | 1069 | 1084 | TTGCAGTGATGTCTCA | 9 | AP | 2606 |
| 1441406 | 218225 | 218240 | 1191 | 1206 | GGAGCTTTCCAGGATT | 32 | AP | 2947 |
| 1441409 | 218221 | 218236 | 1187 | 1202 | CTTTCCAGGATTCATC | 7 | AP | 2862 |
| 1441414 | 222154 | 222169 | 1564 | 1579 | GAACTGACCACCTTCT | 24 | AP | 2490 |
| 1441417 | 244768 | 244783 | N/A | N/A | ATAGGTAATTTATGAG | 14 | AP | 2492 |
| 1441421 | 342928 | 342943 | N/A | N/A | GAGATAATGTGAAGCT | 5 | AP | 2494 |
| 1441424 | 366243 | 366258 | N/A | N/A | ACTATCATATGAAAGC | 27 | AP | 2475 |
| 1441428 | 181931 | 181946 | N/A | N/A | TGCAGAATTGATAACA | 18 | AP | 2864 |
| 1441431 | 365701 | 365716 | N/A | N/A | GCAGTAATATTAAAGC | 28 | AP | 2479 |
| 1441434 | 508292 | 508307 | N/A | N/A | GGTGATTTTAAGAGTC | 34 | AP | 2952 |
| 1441437 | 508287 | 508302 | N/A | N/A | TTTTAAGAGTCCACTA | 69 | AP | 2481 |
| 1441441 | 222038 | 222053 | 1448 | 1463 | AAGAAGTGTTGTCCAA | 2 | AP | 2866 |
| 1441444 | 155904 | 155919 | N/A | N/A | GAAGTTATTATATGGC | 3 | AP | 530 |
| 1441447 | 155901 | 155916 | N/A | N/A | GTTATTATATGGCTGT | 5 | AP | 2485 |
| 1441449 | 229868 | 229883 | N/A | N/A | ATCTCAATATTGTGTG | 5 | AP | 2956 |
| 1441453 | N/A | N/A | 2005 | 2020 | GAAATACCTGAGTGAC | 5 | AP | 462 |
| 1441456 | 222162 | 222177 | 1572 | 1587 | CTCTCCAAGAACTGAC | 8 | AP | 554 |
| 1441459 | 222158 | 222173 | 1568 | 1583 | CCAAGAACTGACCACC | 3 | AP | 2870 |
| 1441672 | 263009 | 263024 | N/A | N/A | AGTGATATGAATGGTA | 1 | AP | 153 |
| | 263050 | 263065 | | | | | | |
| 1441675 | 263006 | 263021 | N/A | N/A | GATATGAATGGTATGA | 7 | AP | 935 |
| | 263047 | 263062 | | | | | | |
| 1441676 | 218086 | 218101 | 1052 | 1067 | AATCTATAGGATGCTG | 5 | AP | 2496 |
| 1441678 | 217659 | 217674 | 625 | 640 | TTTACGACTGGCAGTG | 10 | AP | 552 |
| 1441681 | 225076 | 225091 | N/A | N/A | TGTGTATTATTGACCT | 8 | AP | 706 |
| 1441684 | 225073 | 225088 | N/A | N/A | GTATTATTGACCTGGT | 8 | AP | 229 |
| 1441686 | 222235 | 222250 | 1645 | 1660 | ACTAGAATAGCCCATC | 4 | AP | 922 |
| 1441689 | 222232 | 222247 | 1642 | 1657 | AGAATAGCCCATCACG | 11 | AP | 631 |
| 1441692 | 222229 | 222244 | 1639 | 1654 | ATAGCCCATCACGATG | 14 | AP | 2916 |
| 1441694 | 218174 | 218189 | 1140 | 1155 | CACAAACCAGCTGATG | 9 | AP | 2523 |
| 1441697 | 218171 | 218186 | 1137 | 1152 | AAACCAGCTGATGAGA | 6 | AP | 2959 |
| 1441701 | 263338 | 263353 | N/A | N/A | GAAGTTTGAAGAATGC | 16 | AP | 949 |
| 1441704 | 344746 | 344761 | N/A | N/A | CTAAATTTAGTATCCT | 2 | AP | 2527 |
| 1441707 | 391183 | 391198 | N/A | N/A | ATTAGGATTAAGGAGT | 7 | AP | 2529 |
| 1441710 | 391180 | 391195 | N/A | N/A | AGGATTAAGGAGTTCT | 59 | AP | 2531 |
| 1441715 | 229904 | 229919 | N/A | N/A | ACATTTAGAGGCATTG | 2 | AP | 2497 |
| 1441720 | 222043 | 222058 | 1453 | 1468 | GTATAAAGAAGTGTTG | 6 | AP | 777 |
| 1441724 | 97752 | 97767 | N/A | N/A | CTCATTAAATCAAGGC | 26 | AP | 747 |
| 1441726 | 350509 | 350524 | N/A | N/A | TTTATTATAGGGTTGA | 5 | AP | 1053 |
| 1441731 | 290652 | 290667 | 2131 | 2146 | GGTAAGGCAATGGACT | 11 | AP | 2505 |
| 1441733 | 233651 | 233666 | N/A | N/A | CTGCTCATTAAGTTCT | 12 | AP | 3020 |
| 1441736 | 82464 | 82479 | N/A | N/A | GAACAATGCTGATTCA | 62 | AP | 955 |
| 1441740 | 82460 | 82475 | N/A | N/A | AATGCTGATTCAGGCA | 72 | AP | 2964 |
| 1441741 | 368430 | 368445 | N/A | N/A | GGTGATATTGTATAAG | 4 | AP | 2508 |
| 1441744 | 368427 | 368442 | N/A | N/A | GATATTGTATAAGGTT | 2 | AP | 1060 |
| 1441747 | 242392 | 242407 | N/A | N/A | ACCGTCAAGTAATGAG | 24 | AP | 3021 |
| 1441750 | 242389 | 242404 | N/A | N/A | GTCAAGTAATGAGTTT | 6 | AP | 758 |
| 1441751 | 285255 | 285270 | 1890 | 1905 | GATCTTTTGAATCTGT | 9 | AP | 2513 |
| 1441754 | 285251 | 285266 | 1886 | 1901 | TTTTGAATCTGTCCAG | 5 | AP | 2968 |
| 1441757 | 285186 | 285201 | 1821 | 1836 | GTACCATTACTGAGAT | 14 | AP | 2969 |
| 1441760 | 217791 | 217806 | 757 | 772 | TCCAGTTAACAGCGCG | 37 | AP | 2600 |
| 1441763 | 217788 | 217803 | 754 | 769 | AGTTAACAGCGCGGTG | 16 | AP | 2517 |
| 1441901 | 218077 | 218092 | 1043 | 1058 | GATGCTGGGTCTCTCT | 14 | AP | 381 |
| 1441902 | 82201 | 82216 | N/A | N/A | AGATATTAGCTCATGG | 6 | AP | 2246 |
| 1441906 | 229163 | 229178 | N/A | N/A | TAAAGTATTAACCACC | 2 | AP | 1964 |
| 1441910 | 463910 | 463925 | N/A | N/A | GTCAGATTTAATAGGT | 28 | AP | 2929 |
| 1441913 | 331865 | 331880 | N/A | N/A | ACTATAGTATGATAGC | 124 | AP | 1644 |
| 1441916 | 331862 | 331877 | N/A | N/A | ATAGTATGATAGCACA | 2 | AP | 1533 |
| 1441919 | 331859 | 331874 | N/A | N/A | GTATGATAGCACAAAC | 5 | AP | 2540 |
| 1441922 | 236801 | 236816 | N/A | N/A | TTGTTATACTGATGGG | 6 | AP | 2543 |
| 1441925 | 236798 | 236813 | N/A | N/A | TTATACTGATGGGCTA | 25 | AP | 2545 |
| 1441929 | 217510 | 217525 | 476 | 491 | GCTGTAAACTTTGTTC | 23 | AP | 2547 |
| 1441932 | 217563 | 217578 | 529 | 544 | GGAAATGATTCTGGCT | 13 | AP | 2973 |
| 1441933 | 561183 | 561198 | 10172 | 10187 | TCAGGAATTGAAGTTA | 9 | AP | 2974 |
| 1441936 | 222019 | 222034 | 1429 | 1444 | GGTTTCAAACTGGGAG | 16 | AP | 3022 |
| 1441939 | 222013 | 222028 | 1423 | 1438 | AAACTGGGAGCTGTAC | 13 | AV | 2534 |
| 1442008 | 217669 | 217684 | 635 | 650 | CTCTCTGTGTTTTACG | 5 | AV | 2935 |
| 1442009 | 217668 | 217683 | 634 | 649 | TCTCTGTGTTTTACGA | 7 | AV | 3029 |
| 1442010 | 217658 | 217673 | 624 | 639 | TTACGACTGGCAGTGT | 10 | AV | 475 |
| 1442011 | 218076 | 218091 | 1042 | 1057 | ATGCTGGGTCTCTCTC | 13 | AV | 3023 |
| 1442012 | 235212 | 235227 | N/A | N/A | TTATACACAATTTAGC | 3 | AV | 334 |
| | 235285 | 235300 | | | | | | |
| 1442013 | 226037 | 226052 | N/A | N/A | CCCAACCTCTTGCACC | 72 | AV | 2549 |
| 1442014 | 217746 | 217761 | 712 | 727 | ACTTTCCTCCGTTGTT | 26 | AV | 3024 |
| 1442016 | 217736 | 217751 | 702 | 717 | GTTGTTACTTCAGCTG | 17 | AV | 3025 |
| 1442017 | 218108 | 218123 | 1074 | 1089 | GTTCTTTGCAGTGATG | 9 | AV | 3026 |
| 1442018 | 218098 | 218113 | 1064 | 1079 | GTGATGTCTCAAAATC | 13 | AV | 3027 |
| 1442019 | 218217 | 218232 | 1183 | 1198 | CCAGGATTCATCCCAA | 16 | AV | 2936 |
| 1442020 | 222177 | 222192 | 1587 | 1602 | CCTCCCCCTGATGTCC | 29 | AV | 2893 |
| 1442021 | 222147 | 222162 | 1557 | 1572 | CCACCTTCTTTAATGC | 11 | AV | 347 |
| 1442022 | 342921 | 342936 | N/A | N/A | TGTGAAGCTTAGAACC | 15 | AV | 2937 |
| 1442023 | 508284 | 508299 | N/A | N/A | TAAGAGTCCACTAGCC | 57 | AV | 2550 |
| 1442024 | 181922 | 181937 | N/A | N/A | GATAACAGGTAAATTA | 62 | AV | 2894 |
| 1442025 | 244760 | 244775 | N/A | N/A | TTTATGAGTTAAAGGG | 26 | AV | 2447 |
| 1442026 | 229860 | 229875 | N/A | N/A | ATTGTGTGTCTCAGGC | 9 | AV | 3028 |
| 1442027 | 285147 | 285162 | 1782 | 1797 | ATTTCAGTGCTCCCCA | 5 | AV | 2980 |
| 1442028 | 285466 | 285481 | 2000 | 2015 | ACCTGAGTGACTGATC | 7 | AV | 2981 |
| 1442075 | 263003 | 263018 | N/A | N/A | ATGAATGGTATGATGG | 12 | AV | 2553 |
| 1442076 | 217657 | 217672 | 623 | 638 | TACGACTGGCAGTGTC | 16 | AV | 2982 |
| 1442077 | 225070 | 225085 | N/A | N/A | TTATTGACCTGGTAAA | 52 | AV | 2400 |
| 1442078 | 222237 | 222252 | 1647 | 1662 | CCACTAGAATAGCCCA | 6 | AV | 2551 |
| 1442079 | 222227 | 222242 | 1637 | 1652 | AGCCCATCACGATGCC | 53 | AV | 2984 |
| 1442080 | 326723 | 326738 | N/A | N/A | GATTATGAGGAAACCT | 8 | AV | 2552 |
| 1442081 | 263333 | 263348 | N/A | N/A | TTGAAGAATGCATGTC | 10 | AV | 2554 |
| 1442082 | 344738 | 344753 | N/A | N/A | AGTATCCTTCAATGGC | 15 | AV | 3030 |
| 1442083 | 391186 | 391201 | N/A | N/A | TTAATTAGGATTAAGG | 88 | AV | 2555 |
| 1442084 | 391176 | 391191 | N/A | N/A | TTAAGGAGTTCTGTGT | 9 | AV | 2556 |
| 1442086 | 229900 | 229915 | N/A | N/A | TTAGAGGCATTGCAGG | 21 | AV | 2557 |
| 1442087 | 222051 | 222066 | 1461 | 1476 | GCACTGTAGTATAAAG | 5 | AV | 3031 |
| 1442088 | 97747 | 97762 | N/A | N/A | TAAATCAAGGCAAGTG | 13 | AV | 3034 |
| 1442089 | 350504 | 350519 | N/A | N/A | TATAGGGTTGAAAATA | 60 | AV | 2558 |
| 1442090 | 290659 | 290674 | 2138 | 2153 | TTGCACAGGTAAGGCA | 56 | AV | 2622 |
| 1442091 | 290649 | 290664 | 2128 | 2143 | AAGGCAATGGACTCCA | 6 | AV | 2837 |
| 1442092 | 233653 | 233668 | N/A | N/A | AGCTGCTCATTAAGTT | 99 | AV | 2989 |
| 1442093 | 82458 | 82473 | N/A | N/A | TGCTGATTCAGGCAGT | 74 | AV | 2990 |
| 1442094 | 368422 | 368437 | N/A | N/A | TGTATAAGGTTAGGTG | 3 | AV | 2559 |
| 1442095 | 242394 | 242409 | N/A | N/A | GTACCGTCAAGTAATG | 61 | AV | 2992 |
| 1442096 | 285249 | 285264 | 1884 | 1899 | TTGAATCTGTCCAGCT | 10 | AV | 2993 |
| 1442097 | 217794 | 217809 | 760 | 775 | GTCTCCAGTTAACAGC | 35 | AV | 2994 |
| 1442098 | 217784 | 217799 | 750 | 765 | AACAGCGCGGTGAGAT | 19 | AV | 2995 |
| 1442099 | 222238 | 222253 | 1648 | 1663 | GCCACTAGAATAGCCC | 62 | AV | 2560 |
| 1442100 | 222228 | 222243 | 1638 | 1653 | TAGCCCATCACGATGC | 22 | AV | 2996 |
| 1442134 | 82196 | 82211 | N/A | N/A | TTAGCTCATGGAAAGC | 38 | AV | 2997 |
| 1442135 | 229158 | 229173 | N/A | N/A | TATTAACCACCATTCC | 43 | AV | 2561 |
| 1442136 | 185002 | 185017 | N/A | N/A | GCACTGTGTATTAGGT | 9 | AV | 3032 |
| 1442137 | 331857 | 331872 | N/A | N/A | ATGATAGCACAAACCA | 4 | AV | 3033 |
| 1442138 | 236795 | 236810 | N/A | N/A | TACTGATGGGCTAGCC | 84 | AV | 2562 |
| 1442139 | 217514 | 217529 | 480 | 495 | ATGGGCTGTAAACTTT | 8 | AV | 3000 |
| 1442140 | 217513 | 217528 | 479 | 494 | TGGGCTGTAAACTTTG | 11 | AV | 3001 |
| 1442141 | 217567 | 217582 | 533 | 548 | TTCCGGAAATGATTCT | 16 | AV | 2563 |
| 1442142 | 222021 | 222036 | 1431 | 1446 | ATGGTTTCAAACTGGG | 9 | AV | 2564 |

### Example 2: Dose-Dependent Inhibition of Human PSD3 in A431 Cells by Modified Oligonucleotides

[0475] Modified oligonucleotides selected from the example above were tested at various doses in A431 cells. Cells plated at a density of 10,000 cells per well were treated using free uptake with various concentrations of modified oligonucleotide as specified in the tables below. After a treatment period of approximately 48 hours, total RNA was isolated from the cells and PSD3 RNA levels were measured by quantitative real-time RTPCR. Either human PSD3 primer-probe set RTS41429 (described herein above) or human PSD3 primer-probe set RTS41435 (described herein above) as specified in the tables below were used to measure RNA levels. PSD3 RNA levels were normalized to total RNA content, as measured by RIBOGREEN®. Reduction of PSD3 RNA is presented in the tables below as percent PSD3 RNA, relative to untreated control cells (% UTC).

[0476] The half maximal inhibitory concentration (IC₅₀) of each modified oligonucleotide was calculated using a linear regression on a log/linear plot of the data in Excel and is also presented in the tables below.

[0477] “N.C.” in the table below refers to instances where the value was Not Calculated.

TABLE 6
Dose-dependent reduction of human PSD3 RNA in
A431 cells by modified oligonucleotides

| Compound | PSD3 RNA (% UTC) RTS41429 | | | | IC₅₀ |
|---|---|---|---|---|---|
| No. | 78 nM | 313 nM | 1250 nM | 5000 nM | (μM) |
| 1173386 | 37 | 33 | 32 | 40 | N.C. |
| 1173390 | 51 | 44 | 49 | 56 | N.C. |
| 1173391 | 43 | 36 | 31 | 34 | <0.08 |
| 1173396 | 40 | 30 | 26 | 22 | <0.08 |
| 1173403 | 12 | 5 | 2 | 2 | <0.08 |
| 1173404 | 19 | 7 | 3 | 2 | <0.08 |
| 1173405 | 49 | 25 | 13 | 5 | <0.08 |
| 1173406 | 59 | 45 | 26 | 19 | 0.17 |
| 1173570 | 29 | 20 | 17 | 18 | <0.08 |
| 1173586 | 52 | 36 | 24 | 21 | <0.08 |
| 1173588 | 72 | 48 | 42 | 45 | 0.80 |
| 1173589 | 91 | 65 | 45 | 32 | 1.11 |
| 1173594 | 32 | 23 | 19 | 18 | <0.08 |
| 1173595 | 64 | 43 | 30 | 24 | 0.23 |
| 1173597 | 41 | 23 | 18 | 25 | <0.08 |
| 1173598 | 48 | 29 | 22 | 20 | <0.08 |
| 1173599 | 39 | 26 | 20 | 22 | <0.08 |
| 1173601 | 28 | 20 | 18 | 26 | <0.08 |
| 1173603 | 57 | 40 | 27 | 21 | 0.13 |

TABLE 7
Dose-dependent reduction of human PSD3 RNA in
A431 cells by modified oligonucleotides

| Compound | PSD3 RNA (% UTC) RTS41435 | | | | IC₅₀ |
|---|---|---|---|---|---|
| No. | 78 nM | 313 nM | 1250 nM | 5000 nM | (μM) |
| 1173386 | 13 | 14 | 12 | 10 | <0.08 |
| 1173390 | 25 | 21 | 21 | 17 | <0.08 |
| 1173391 | 20 | 14 | 13 | 15 | <0.08 |
| 1173396 | 22 | 13 | 12 | 10 | <0.08 |
| 1173403 | 15 | 8 | 7 | 8 | <0.08 |
| 1173404 | 25 | 10 | 9 | 8 | <0.08 |
| 1173405 | 83 | 44 | 22 | 14 | 0.36 |
| 1173406 | 89 | 66 | 44 | 33 | 1.13 |
| 1173570 | 24 | 13 | 11 | 15 | <0.08 |
| 1173586 | 56 | 22 | 12 | 11 | <0.08 |
| 1173588 | 55 | 46 | 30 | 17 | 0.16 |
| 1173589 | 81 | 57 | 27 | 13 | 0.46 |
| 1173594 | 16 | 13 | 10 | 8 | <0.08 |
| 1173595 | 63 | 37 | 21 | 16 | 0.15 |
| 1173597 | 34 | 11 | 7 | 5 | <0.08 |
| 1173598 | 61 | 26 | 13 | 10 | 0.09 |
| 1173599 | 34 | 14 | 9 | 7 | <0.08 |
| 1173601 | 20 | 9 | 6 | 5 | <0.08 |
| 1173603 | 53 | 33 | 19 | 11 | 0.08 |

TABLE 8
Dose-dependent reduction of human PSD3 RNA in A431
cells by modified oligonucleotides

| Compound | PSD3 RNA (% UTC) RTS41435 | | | | | IC₅₀ |
|---|---|---|---|---|---|---|
| No. | 8 nM | 31 nM | 125 nM | 500 nM | 2000 nM | (μM) |
| 1173403 | 89 | 44 | 23 | 7 | 8 | 0.04 |
| 1408277 | 72 | 36 | 17 | 16 | 15 | 0.02 |
| 1408278 | 92 | 28 | 14 | 9 | 9 | 0.03 |
| 1408291 | 71 | 70 | 27 | 15 | 8 | 0.05 |
| 1408294 | 80 | 60 | 29 | 13 | 10 | 0.05 |
| 1408299 | 70 | 48 | 26 | 13 | 8 | 0.03 |
| 1408400 | 68 | 63 | 23 | 17 | 13 | 0.04 |
| 1408456 | 73 | 57 | 44 | 17 | 10 | 0.05 |
| 1408461 | 95 | 77 | 54 | 31 | 31 | 0.23 |
| 1408747 | 66 | 34 | 16 | 16 | 11 | 0.01 |
| 1408751 | 77 | 46 | 21 | 15 | 9 | 0.03 |
| 1408767 | 71 | 33 | 26 | 14 | 14 | 0.02 |
| 1408797 | 89 | 60 | 35 | 30 | 22 | 0.10 |
| 1408808 | 96 | 121 | 50 | 20 | 16 | 0.22 |
| 1408819 | 121 | 43 | 24 | 10 | 12 | 0.08 |

TABLE 9
Dose-dependent reduction of human PSD3 RNA in A431
cells by modified oligonucleotides

| Compound | PSD3 RNA (% UTC) RTS41435 | | | | | IC₅₀ |
|---|---|---|---|---|---|---|
| No. | 8 nM | 31 nM | 125 nM | 500 nM | 2000 nM | (μM) |
| 1173403 | 60 | 40 | 15 | 8 | 7 | 0.01 |
| 1408267 | 68 | 26 | 24 | 12 | 16 | 0.01 |
| 1408407 | 117 | 41 | 25 | 9 | 6 | 0.07 |
| 1408412 | 74 | 77 | 69 | 39 | 21 | 0.23 |
| 1408437 | 102 | 69 | 27 | 9 | 1 | 0.08 |
| 1408441 | 127 | 68 | 41 | 12 | N.C. | 0.09 |
| 1408473 | 71 | 72 | 36 | 20 | 11 | 0.07 |
| 1408497 | 90 | 54 | 30 | 21 | 16 | 0.07 |
| 1408510 | 74 | 73 | 63 | 37 | 19 | 0.17 |
| 1408521 | 99 | 76 | 41 | 26 | 18 | 0.14 |
| 1408759 | 72 | 56 | 27 | 20 | 18 | 0.04 |
| 1408814 | 63 | 35 | 24 | 22 | 12 | 0.01 |
| 1408815 | 92 | 48 | 18 | 10 | 9 | 0.05 |
| 1408859 | 137 | 64 | 44 | 26 | 12 | 0.17 |
| 1408876 | 82 | 62 | 25 | 22 | 10 | 0.06 |

TABLE 10
Dose-dependent reduction of human PSD3 RNA in A431
cells by modified oligonucleotides

| Compound | PSD3 RNA (% UTC) RTS41435 | | | | | IC₅₀ |
|---|---|---|---|---|---|---|
| No. | 8 nM | 31 nM | 125 nM | 500 nM | 2000 nM | (μM) |
| 1173403 | 68 | 26 | 14 | 6 | 6 | 0.01 |
| 1173404 | 106 | 40 | 14 | 8 | 5 | 0.05 |
| 1408266 | 51 | 21 | 10 | 8 | 6 | <0.008 |
| 1408357 | 100 | 61 | 20 | 6 | 5 | 0.06 |
| 1408360 | 86 | 50 | 19 | 8 | 5 | 0.04 |
| 1408370 | 66 | 28 | 6 | 3 | 4 | 0.01 |
| 1408372 | 93 | 42 | 17 | 9 | 6 | 0.04 |
| 1408449 | 73 | 66 | 46 | 14 | 4 | 0.06 |
| 1408757 | 66 | 54 | 27 | 8 | 6 | 0.03 |
| 1408789 | 57 | 41 | 18 | 10 | 9 | 0.01 |
| 1408794 | 50 | 43 | 11 | 12 | 9 | 0.01 |
| 1408805 | 93 | 66 | 32 | 11 | 7 | 0.08 |
| 1408809 | 76 | 53 | 27 | 17 | 10 | 0.04 |
| 1408813 | 62 | 35 | 14 | 6 | 5 | 0.01 |
| 1408858 | 63 | 55 | 23 | 11 | 7 | 0.03 |

TABLE 11
Dose-dependent reduction of human PSD3 RNA in A431
cells by modified oligonucleotides

| Compound | PSD3 RNA (% UTC) RTS41435 | | | | | IC₅₀ |
|---|---|---|---|---|---|---|
| No. | 3 nM | 16 nM | 80 nM | 400 nM | 2000 nM | (μM) |
| 1173403 | 95 | 40 | 12 | 4 | 4 | 0.02 |
| 1408296 | 59 | 34 | 11 | 8 | 5 | 0.003 |
| 1408356 | 78 | 58 | 32 | 11 | 4 | 0.03 |
| 1408361 | 61 | 41 | 18 | 6 | 4 | 0.01 |
| 1408365 | 59 | 23 | 10 | 5 | 5 | <0.003 |
| 1408366 | 81 | 46 | 22 | 12 | 6 | 0.02 |
| 1408375 | 61 | 39 | 16 | 6 | 4 | 0.01 |
| 1408383 | 55 | 46 | 10 | 3 | 4 | 0.004 |
| 1409326 | 60 | 41 | 13 | 4 | 5 | 0.01 |
| 1409614 | 79 | 60 | 22 | 10 | 4 | 0.02 |
| 1410093 | 73 | 51 | 14 | 5 | 3 | 0.01 |
| 1410193 | 67 | 46 | 33 | 16 | 6 | 0.01 |
| 1410297 | 74 | 46 | 13 | 4 | 3 | 0.01 |
| 1411145 | 86 | 23 | 7 | 3 | 4 | 0.01 |
| 1411362 | 94 | 70 | 15 | 7 | 6 | 0.04 |

TABLE 12
Dose-dependent reduction of human PSD3 RNA in A431
cells by modified oligonucleotides

| Compound | PSD3 RNA (% UTC) RTS41435 | | | | | IC₅₀ |
|---|---|---|---|---|---|---|
| No. | 8 nM | 31 nM | 125 nM | 500 nM | 2000 nM | (μM) |
| 1173403 | 74 | 34 | 7 | 6 | 6 | 0.02 |
| 1408704 | 87 | 52 | 30 | 17 | 7 | 0.06 |
| 1409345 | 64 | 50 | 24 | 16 | 5 | 0.02 |
| 1409495 | 50 | 25 | 12 | 7 | 9 | <0.008 |
| 1409923 | 86 | 58 | 26 | 13 | 7 | 0.06 |
| 1409946 | 65 | 48 | 19 | 5 | 5 | 0.02 |
| 1410071 | 60 | 18 | 6 | 5 | 5 | <0.008 |
| 1410215 | 63 | 68 | 36 | 10 | 6 | 0.04 |
| 1410225 | 70 | 60 | 16 | 4 | 1 | 0.03 |
| 1410233 | 45 | 14 | 5 | 4 | 4 | <0.008 |
| 1410352 | 82 | 43 | 8 | 5 | 2 | 0.03 |
| 1410363 | 84 | 40 | 16 | 3 | 4 | 0.03 |
| 1410436 | 62 | 28 | 21 | 9 | 5 | 0.01 |
| 1411113 | 50 | 34 | 16 | 8 | 6 | <0.008 |
| 1411146 | 51 | 49 | 26 | 11 | 12 | 0.01 |

TABLE 13
Dose-dependent reduction of human PSD3 RNA in A431
cells by modified oligonucleotides

| Compound | PSD3 RNA (% UTC) RTS41435 | | | | | IC₅₀ |
|---|---|---|---|---|---|---|
| No. | 8 nM | 31 nM | 125 nM | 500 nM | 2000 nM | (μM) |
| 1173403 | 79 | 32 | 14 | 5 | 5 | 0.02 |
| 1408328 | 86 | 56 | 26 | 11 | 6 | 0.05 |
| 1408344 | 57 | 32 | 10 | 5 | 4 | <0.008 |
| 1409091 | 74 | 34 | 12 | 4 | 4 | 0.02 |
| 1409215 | 62 | 45 | 28 | 9 | 4 | 0.02 |
| 1409384 | 59 | 65 | 20 | 7 | 4 | 0.03 |
| 1409393 | 92 | 32 | 26 | 4 | 3 | 0.04 |
| 1409953 | 79 | 62 | 31 | 13 | 10 | 0.06 |
| 1410129 | 91 | 80 | 37 | 12 | 3 | 0.09 |
| 1410391 | 100 | 61 | 24 | 12 | 8 | 0.07 |
| 1410423 | 56 | 21 | 8 | 4 | 5 | <0.008 |
| 1410497 | 58 | 48 | 22 | 10 | 6 | 0.02 |
| 1411157 | 71 | 29 | 12 | 7 | 5 | 0.01 |
| 1411192 | 68 | 62 | 23 | 11 | 6 | 0.04 |
| 1411386 | 48 | 47 | 18 | 10 | 6 | 0.008 |

TABLE 14
Dose-dependent reduction of human PSD3 RNA in A431
cells by modified oligonucleotides

| Compound | PSD3 RNA (% UTC) RTS41435 | | | | | IC₅₀ |
|---|---|---|---|---|---|---|
| No. | 8 nM | 31 nM | 125 nM | 500 nM | 2000 nM | (μM) |
| 1173403 | 98 | 44 | 12 | 8 | 6 | 0.04 |
| 1408286 | 48 | 31 | 12 | 7 | 7 | <0.008 |
| 1408304 | 48 | 39 | 8 | 4 | 4 | <0.008 |
| 1408342 | 65 | 56 | 26 | 10 | 5 | 0.03 |
| 1408343 | 55 | 37 | 12 | 3 | 3 | <0.008 |
| 1408415 | 63 | 45 | 19 | 11 | 6 | 0.02 |
| 1409194 | 83 | 52 | 29 | 9 | 5 | 0.05 |
| 1409255 | 80 | 86 | 32 | 17 | 7 | 0.09 |
| 1409396 | 81 | 84 | 35 | 14 | 6 | 0.09 |
| 1409418 | 104 | 79 | 26 | 7 | 4 | 0.09 |
| 1409420 | 58 | 38 | 15 | 6 | 4 | 0.01 |
| 1409457 | 94 | 72 | 41 | 14 | 5 | 0.09 |
| 1409827 | 134 | 54 | 27 | 8 | 6 | 0.10 |
| 1410063 | 74 | 28 | 8 | 3 | 2 | 0.01 |
| 1410348 | 77 | 52 | 18 | 8 | 4 | 0.03 |

TABLE 15
Dose-dependent reduction of human PSD3 RNA in A431
cells by modified oligonucleotides

| Compound | PSD3 RNA (% UTC) RTS41435 | | | | | IC₅₀ |
|---|---|---|---|---|---|---|
| No. | 8 nM | 31 nM | 125 nM | 500 nM | 2000 nM | (μM) |
| 1173403 | 79 | 24 | 10 | 5 | 4 | 0.02 |
| 1408282 | 79 | 39 | 11 | 9 | 6 | 0.02 |
| 1408292 | 44 | 10 | 4 | 3 | 4 | <0.008 |
| 1408308 | 80 | 74 | 38 | 16 | 6 | 0.08 |
| 1409419 | 55 | 61 | 28 | 13 | 5 | 0.02 |
| 1409469 | 57 | 45 | 21 | 7 | 4 | 0.01 |
| 1409636 | 61 | 32 | 11 | 6 | 4 | 0.01 |
| 1409945 | 134 | 72 | 23 | 14 | 8 | 0.13 |
| 1409970 | 55 | 47 | 31 | 12 | 6 | 0.02 |
| 1410113 | 123 | 85 | 46 | 23 | 10 | 0.18 |
| 1410131 | 48 | 33 | 14 | 8 | 3 | <0.008 |
| 1410142 | 86 | 34 | 19 | 4 | 4 | 0.03 |
| 1410176 | 114 | 37 | 18 | 8 | 5 | 0.06 |
| 1410506 | 68 | 68 | 16 | 4 | 1 | 0.03 |
| 1411403 | 59 | 52 | 22 | 10 | 6 | 0.02 |

TABLE 16
Dose-dependent reduction of human PSD3 RNA in A431
cells by modified oligonucleotides

| Compound | PSD3 RNA (% UTC) RTS41435 | | | | | IC₅₀ |
|---|---|---|---|---|---|---|
| No. | 8 nM | 31 nM | 125 nM | 500 nM | 2000 nM | (μM) |
| 1173403 | 84 | 59 | 23 | 11 | 10 | 0.05 |
| 1408242 | 98 | 49 | 18 | 13 | 10 | 0.06 |
| 1408259 | 81 | 61 | 32 | 11 | 6 | 0.06 |
| 1408633 | 84 | 62 | 34 | 15 | 10 | 0.07 |
| 1409097 | 86 | 83 | 46 | 21 | 9 | 0.12 |
| 1409293 | 100 | 51 | 21 | 12 | 8 | 0.06 |
| 1409302 | 101 | 85 | 44 | 22 | 11 | 0.15 |
| 1409833 | 107 | 81 | 62 | 18 | 7 | 0.16 |
| 1409922 | 136 | 101 | 45 | 22 | 13 | 0.22 |
| 1409940 | 93 | 100 | 39 | 19 | 8 | 0.14 |
| 1410181 | 90 | 62 | 34 | 15 | 13 | 0.08 |
| 1410211 | 79 | 89 | 25 | 12 | 8 | 0.08 |
| 1410341 | 110 | 74 | 49 | 14 | 7 | 0.13 |
| 1410521 | 105 | 70 | 62 | 17 | 11 | 0.15 |
| 1411118 | 77 | 74 | 32 | 19 | 11 | 0.07 |

TABLE 17
Dose-dependent reduction of human PSD3 RNA in A431
cells by modified oligonucleotides

| Compound | PSD3 RNA (% UTC) RTS41435 | | | | | IC₅₀ |
|---|---|---|---|---|---|---|
| No. | 8 nM | 31 nM | 125 nM | 500 nM | 2000 nM | (μM) |
| 1173403 | 85 | 48 | 17 | 5 | 7 | 0.04 |
| 1408305 | 82 | 54 | 24 | 8 | 5 | 0.04 |
| 1408306 | 67 | 43 | 11 | 6 | 4 | 0.02 |
| 1408414 | 79 | 54 | 28 | 13 | 8 | 0.04 |
| 1408632 | 74 | 65 | 35 | 13 | 6 | 0.05 |
| 1409264 | 72 | 54 | 20 | 6 | 6 | 0.03 |
| 1409534 | 92 | 79 | 25 | 16 | 9 | 0.09 |
| 1409824 | 73 | 38 | 14 | 7 | 5 | 0.02 |
| 1409883 | 79 | 62 | 23 | 10 | 6 | 0.05 |
| 1409977 | 69 | 24 | 7 | 3 | 3 | 0.01 |
| 1410167 | 84 | 69 | 36 | 10 | 4 | 0.07 |
| 1410220 | 102 | 84 | 39 | 18 | 10 | 0.13 |
| 1410390 | 85 | 64 | 25 | 10 | 6 | 0.06 |
| 1411136 | 88 | 67 | 56 | 16 | 8 | 0.10 |
| 1411395 | 79 | 75 | 26 | 12 | 11 | 0.07 |

TABLE 18
Dose-dependent reduction of human PSD3 RNA in A431
cells by modified oligonucleotides

| Compound | PSD3 RNA (% UTC) RTS41435 | | | | | IC₅₀ |
|---|---|---|---|---|---|---|
| No. | 3 nM | 16 nM | 80 nM | 400 nM | 2000 nM | (μM) |
| 1173403 | 87 | 42 | 9 | 6 | 6 | 0.02 |
| 1408257 | 112 | 49 | 15 | 5 | 4 | 0.04 |
| 1408258 | 97 | 96 | 57 | 19 | 9 | 0.12 |
| 1408774 | 77 | 45 | 19 | 10 | 8 | 0.02 |
| 1408780 | 95 | 57 | 22 | 12 | 7 | 0.04 |
| 1408781 | 86 | 52 | 20 | 9 | 5 | 0.02 |
| 1409410 | 109 | 80 | 47 | 17 | 7 | 0.09 |
| 1409519 | 88 | 80 | 56 | 22 | 10 | 0.09 |
| 1410042 | 104 | 83 | 52 | 16 | 6 | 0.09 |
| 1410119 | 96 | 73 | 26 | 7 | 6 | 0.05 |
| 1410156 | 95 | 43 | 9 | 5 | 4 | 0.02 |
| 1410248 | 88 | 68 | 16 | 7 | 4 | 0.03 |
| 1410456 | 105 | 100 | 47 | 14 | 4 | 0.10 |
| 1410458 | 81 | 67 | 27 | 9 | 4 | 0.03 |
| 1410546 | 107 | 75 | 34 | 12 | 5 | 0.07 |

TABLE 19
Dose-dependent reduction of human PSD3 RNA in A431
cells by modified oligonucleotides

| Compound | PSD3 RNA (% UTC) RTS41435 | | | | | IC₅₀ |
|---|---|---|---|---|---|---|
| No. | 8 nM | 31 nM | 125 nM | 500 nM | 2000 nM | (μM) |
| 1173403 | 91 | 57 | 14 | 4 | 5 | 0.05 |
| 1408256 | 91 | 53 | 16 | 4 | 2 | 0.05 |
| 1408309 | 96 | 86 | 48 | 22 | 8 | 0.14 |
| 1408605 | 92 | 61 | 20 | 7 | 5 | 0.06 |
| 1408630 | 123 | 75 | 55 | 18 | 6 | 0.16 |
| 1408766 | 94 | 60 | 20 | 7 | 5 | 0.06 |
| 1409295 | 657 | 74 | 34 | 11 | 9 | 0.37 |
| 1409374 | 98 | 79 | 44 | 16 | 8 | 0.12 |
| 1409684 | 99 | 61 | 31 | 14 | 8 | 0.08 |
| 1409814 | 88 | 76 | 41 | 17 | 7 | 0.10 |
| 1409930 | 122 | 98 | 35 | 18 | 12 | 0.17 |
| 1410024 | 97 | 70 | 41 | 16 | 9 | 0.10 |
| 1410152 | 87 | 57 | 19 | 8 | 4 | 0.05 |
| 1410575 | 90 | 88 | 35 | 12 | 5 | 0.10 |
| 1411317 | 92 | 55 | 19 | 11 | 6 | 0.05 |

TABLE 20
Dose-dependent reduction of human PSD3 RNA in A431
cells by modified oligonucleotides

| Compound | PSD3 RNA (% UTC) RTS41435 | | | | | IC₅₀ |
|---|---|---|---|---|---|---|
| No. | 8 nM | 31 nM | 125 nM | 500 nM | 2000 nM | (μM) |
| 1173403 | 83 | 40 | 12 | 6 | 7 | 0.03 |
| 1408255 | 98 | 70 | 27 | 8 | 6 | 0.08 |
| 1408312 | 89 | 79 | 37 | 16 | 8 | 0.10 |
| 1409092 | 65 | 22 | 5 | 6 | 8 | 0.01 |
| 1409299 | 94 | 53 | 19 | 8 | 6 | 0.05 |
| 1409381 | 99 | 92 | 50 | 19 | 9 | 0.15 |
| 1409405 | 94 | 77 | 31 | 13 | 7 | 0.09 |
| 1410036 | 94 | 79 | 36 | 10 | 3 | 0.09 |
| 1410041 | 90 | 63 | 22 | 13 | 9 | 0.06 |
| 1410069 | 99 | 71 | 33 | 13 | 9 | 0.09 |
| 1410101 | 90 | 74 | 33 | 13 | 8 | 0.08 |
| 1410509 | 99 | 76 | 42 | 17 | 8 | 0.11 |
| 1410545 | 92 | 45 | 12 | 7 | 7 | 0.04 |
| 1410560 | 86 | 56 | 29 | 15 | 11 | 0.06 |
| 1411095 | 82 | 44 | 17 | 10 | 7 | 0.03 |

TABLE 21
Dose-dependent reduction of human PSD3 RNA in A431
cells by modified oligonucleotides

| Compound | PSD3 RNA (% UTC) RTS41435 | | | | | IC₅₀ |
|---|---|---|---|---|---|---|
| No. | 8 nM | 31 nM | 125 nM | 500 nM | 2000 nM | (μM) |
| 1173403 | 75 | 39 | 11 | 7 | 7 | 0.02 |
| 1408560 | 95 | 88 | 51 | 28 | 16 | 0.18 |
| 1409113 | 102 | 93 | 62 | 29 | 17 | 0.23 |
| 1409394 | 92 | 76 | 38 | 21 | 13 | 0.11 |
| 1409412 | 99 | 73 | 52 | 25 | 13 | 0.14 |
| 1409450 | 92 | 83 | 56 | 23 | 14 | 0.16 |
| 1409465 | 90 | 75 | 51 | 22 | 9 | 0.12 |
| 1409500 | 94 | 70 | 36 | 14 | 8 | 0.09 |
| 1410016 | 85 | 71 | 32 | 13 | 9 | 0.07 |
| 1410155 | 89 | 81 | 38 | 16 | 8 | 0.10 |
| 1410169 | 80 | 43 | 14 | 6 | 6 | 0.03 |
| 1410190 | 104 | 88 | 57 | 27 | 13 | 0.19 |
| 1410242 | 93 | 75 | 48 | 17 | 8 | 0.11 |
| 1410339 | 89 | 74 | 38 | 17 | 11 | 0.10 |
| 1411127 | 70 | 38 | 14 | 10 | 7 | 0.02 |

TABLE 22
Dose-dependent reduction of human PSD3 RNA in A431
cells by modified oligonucleotides

| Compound | PSD3 RNA (% UTC) RTS41435 | | | | | IC₅₀ |
|---|---|---|---|---|---|---|
| No. | 8 nM | 31 nM | 125 nM | 500 nM | 2000 nM | (μM) |
| 1173403 | 85 | 45 | 12 | 6 | 6 | 0.03 |
| 1408248 | 78 | 40 | 12 | 6 | 5 | 0.02 |
| 1408625 | 97 | 61 | 23 | 11 | 7 | 0.07 |
| 1409278 | 82 | 59 | 23 | 10 | 6 | 0.05 |
| 1409375 | 88 | 71 | 34 | 13 | 6 | 0.08 |
| 1409473 | 83 | 52 | 17 | 7 | 5 | 0.04 |
| 1409481 | 78 | 52 | 17 | 8 | 4 | 0.03 |
| 1409859 | 72 | 51 | 17 | 6 | 3 | 0.03 |
| 1409909 | 105 | 78 | 39 | 15 | 7 | 0.12 |
| 1410141 | 92 | 63 | 21 | 6 | 4 | 0.06 |
| 1410195 | 79 | 58 | 21 | 10 | 6 | 0.04 |
| 1410405 | 93 | 66 | 34 | 13 | 7 | 0.08 |
| 1410533 | 77 | 43 | 9 | 4 | 4 | 0.02 |
| 1411117 | 71 | 37 | 17 | 13 | 9 | 0.02 |
| 1411379 | 82 | 66 | 25 | 10 | 7 | 0.06 |

TABLE 23
Dose-dependent reduction of human PSD3 RNA in A431
cells by modified oligonucleotides

| Compound | PSD3 RNA (% UTC) RTS41435 | | | | | IC₅₀ |
|---|---|---|---|---|---|---|
| No. | 8 nM | 31 nM | 125 nM | 500 nM | 2000 nM | (μM) |
| 1173403 | 88 | 46 | 13 | 6 | 6 | 0.04 |
| 1408331 | 83 | 58 | 27 | 10 | 5 | 0.05 |
| 1409147 | 85 | 43 | 12 | 5 | 4 | 0.03 |
| 1409207 | 82 | 50 | 19 | 7 | 4 | 0.04 |
| 1409391 | 85 | 60 | 22 | 8 | 4 | 0.05 |
| 1409408 | 89 | 62 | 31 | 12 | 5 | 0.06 |
| 1409546 | 96 | 59 | 21 | 8 | 4 | 0.06 |
| 1409751 | 97 | 75 | 40 | 14 | 6 | 0.10 |
| 1409881 | 92 | 75 | 40 | 15 | 10 | 0.10 |
| 1409906 | 86 | 53 | 18 | 7 | 6 | 0.04 |
| 1410066 | 85 | 72 | 44 | 16 | 8 | 0.09 |
| 1410087 | 95 | 58 | 21 | 8 | 5 | 0.06 |
| 1410556 | 90 | 80 | 44 | 16 | 6 | 0.11 |
| 1411195 | 94 | 62 | 33 | 15 | 10 | 0.08 |
| 1411204 | 78 | 34 | 15 | 12 | 11 | 0.02 |

TABLE 24
Dose-dependent reduction of human PSD3 RNA in A431
cells by modified oligonucleotides

| Compound | PSD3 RNA (% UTC) RTS41435 | | | | | IC₅₀ |
|---|---|---|---|---|---|---|
| No. | 8 nM | 31 nM | 125 nM | 500 nM | 2000 nM | (μM) |
| 1173403 | 79 | 45 | 13 | 6 | 7 | 0.03 |
| 1408573 | 90 | 55 | 20 | 9 | 7 | 0.05 |
| 1409305 | 95 | 78 | 44 | 18 | 11 | 0.12 |
| 1409336 | 95 | 89 | 60 | 25 | 11 | 0.18 |
| 1409342 | 89 | 67 | 33 | 14 | 7 | 0.08 |
| 1409668 | 83 | 52 | 20 | 8 | 5 | 0.04 |
| 1409767 | 78 | 48 | 16 | 8 | 8 | 0.03 |
| 1409854 | 86 | 48 | 19 | 6 | 6 | 0.04 |
| 1410028 | 95 | 85 | 50 | 25 | 13 | 0.16 |
| 1410116 | 98 | 72 | 38 | 16 | 7 | 0.10 |
| 1410139 | 86 | 58 | 22 | 8 | 6 | 0.05 |
| 1410201 | 102 | 79 | 52 | 30 | 15 | 0.18 |
| 1411251 | 92 | 68 | 33 | 17 | 12 | 0.09 |
| 1411302 | 87 | 52 | 22 | 11 | 9 | 0.05 |
| 1411443 | 71 | 43 | 25 | 17 | 13 | 0.03 |

TABLE 25
Dose-dependent reduction of human PSD3 RNA in A431
cells by modified oligonucleotides

| Compound | PSD3 RNA (% UTC) RTS41435 | | | | | IC₅₀ |
|---|---|---|---|---|---|---|
| No. | 8 nM | 31 nM | 125 nM | 500 nM | 2000 nM | (μM) |
| 1173403 | 86 | 48 | 12 | 7 | 7 | 0.04 |
| 1408325 | 82 | 54 | 18 | 7 | 5 | 0.04 |
| 1408326 | 95 | 83 | 53 | 25 | 12 | 0.16 |
| 1409179 | 95 | 86 | 41 | 18 | 9 | 0.12 |
| 1409200 | 102 | 83 | 53 | 25 | 13 | 0.17 |
| 1409243 | 97 | 89 | 64 | 27 | 17 | 0.22 |
| 1409480 | 84 | 54 | 15 | 6 | 5 | 0.04 |
| 1409621 | 88 | 69 | 37 | 18 | 12 | 0.09 |
| 1409752 | 95 | 78 | 40 | 17 | 7 | 0.11 |
| 1409807 | 92 | 69 | 30 | 10 | 6 | 0.07 |
| 1410097 | 92 | 77 | 45 | 22 | 10 | 0.12 |
| 1410132 | 89 | 72 | 38 | 16 | 9 | 0.09 |
| 1410387 | 80 | 38 | 11 | 6 | 6 | 0.02 |
| 1411295 | 104 | 85 | 56 | 30 | 16 | 0.21 |
| 1411358 | 103 | 87 | 58 | 33 | 22 | 0.25 |

TABLE 26
Dose-dependent reduction of human PSD3 RNA in A431
cells by modified oligonucleotides

| Compound | PSD3 RNA (% UTC) RTS41435 | | | | | IC₅₀ |
|---|---|---|---|---|---|---|
| No. | 8 nM | 31 nM | 125 nM | 500 nM | 2000 nM | (μM) |
| 1173403 | 79 | 48 | 14 | 8 | 7 | 0.03 |
| 1408622 | 99 | 86 | 52 | 25 | 12 | 0.17 |
| 1409127 | 90 | 60 | 29 | 10 | 6 | 0.06 |
| 1409170 | 85 | 61 | 22 | 8 | 6 | 0.05 |
| 1409284 | 89 | 73 | 37 | 13 | 7 | 0.09 |
| 1409528 | 108 | 85 | 64 | 37 | 15 | 0.25 |
| 1409555 | 94 | 101 | 41 | 15 | 8 | 0.14 |
| 1409719 | 91 | 63 | 21 | 7 | 6 | 0.06 |
| 1409829 | 77 | 61 | 27 | 13 | 12 | 0.05 |
| 1409893 | 90 | 71 | 31 | 13 | 8 | 0.08 |
| 1410094 | 94 | 55 | 18 | 9 | 8 | 0.05 |
| 1410267 | 101 | 88 | 49 | 21 | 10 | 0.16 |
| 1410342 | 99 | 70 | 53 | 22 | 9 | 0.13 |
| 1410392 | 91 | 80 | 47 | 22 | 10 | 0.13 |
| 1410467 | 99 | 63 | 22 | 8 | 6 | 0.07 |

TABLE 27
Dose-dependent reduction of human PSD3 RNA in A431
cells by modified oligonucleotides

| Compound | PSD3 RNA (% UTC) RTS41435 | | | | | IC₅₀ |
|---|---|---|---|---|---|---|
| No. | 8 nM | 31 nM | 125 nM | 500 nM | 2000 nM | (μM) |
| 1173403 | 85 | 44 | 13 | 6 | 6 | 0.03 |
| 1408597 | 106 | 87 | 24 | 11 | 8 | 0.11 |
| 1409109 | 87 | 56 | 17 | 8 | 7 | 0.05 |
| 1409499 | 75 | 37 | 10 | 6 | 5 | 0.02 |
| 1409549 | 90 | 82 | 52 | 23 | 8 | 0.13 |
| 1409563 | 88 | 84 | 49 | 19 | 10 | 0.13 |
| 1409842 | 104 | 73 | 34 | 11 | 3 | 0.10 |
| 1410088 | 92 | 84 | 39 | 14 | 6 | 0.11 |
| 1410314 | 90 | 61 | 30 | 13 | 8 | 0.07 |
| 1410327 | 99 | 91 | 49 | 20 | 9 | 0.15 |
| 1410407 | 92 | 61 | 25 | 8 | 5 | 0.06 |
| 1410495 | 100 | 90 | 59 | 19 | 9 | 0.17 |
| 1410515 | 101 | 84 | 50 | 23 | 9 | 0.15 |
| 1411300 | 103 | 76 | 40 | 20 | 10 | 0.12 |
| 1411348 | 93 | 72 | 37 | 14 | 9 | 0.09 |

TABLE 28
Dose-dependent reduction of human PSD3 RNA in A431
cells by modified oligonucleotides

| Compound | PSD3 RNA (% UTC) RTS41435 | | | | | IC₅₀ |
|---|---|---|---|---|---|---|
| No. | 8 nM | 31 nM | 125 nM | 500 nM | 2000 nM | (μM) |
| 1173403 | 83 | 48 | 14 | 7 | 7 | 0.03 |
| 1408301 | 85 | 54 | 24 | 11 | 8 | 0.05 |
| 1408302 | 98 | 58 | 20 | 9 | 8 | 0.06 |
| 1409107 | 98 | 87 | 49 | 22 | 9 | 0.15 |
| 1409206 | 94 | 85 | 59 | 31 | 13 | 0.19 |
| 1409327 | 101 | 71 | 32 | 9 | 3 | 0.09 |
| 1409599 | 99 | 84 | 44 | 14 | 6 | 0.12 |
| 1409617 | 91 | 70 | 26 | 12 | 10 | 0.07 |
| 1409913 | 96 | 80 | 34 | 16 | 8 | 0.10 |
| 1410218 | 95 | 91 | 37 | 14 | 7 | 0.12 |
| 1410324 | 86 | 82 | 46 | 15 | 7 | 0.10 |
| 1410537 | 93 | 84 | 52 | 22 | 10 | 0.14 |
| 1410549 | 82 | 56 | 25 | 13 | 7 | 0.05 |
| 1410572 | 102 | 82 | 38 | 10 | 6 | 0.11 |
| 1411197 | 76 | 35 | 14 | 8 | 5 | 0.02 |

TABLE 29
Dose-dependent reduction of human PSD3 RNA in A431
cells by modified oligonucleotides

| Compound | PSD3 RNA (% UTC) RTS41435 | | | | | IC₅₀ |
|---|---|---|---|---|---|---|
| No. | 8 nM | 31 nM | 125 nM | 500 nM | 2000 nM | (μM) |
| 1173403 | 81 | 47 | 16 | 8 | 7 | 0.03 |
| 1408300 | 91 | 64 | 22 | 10 | 7 | 0.06 |
| 1408835 | 63 | 25 | 11 | 9 | 9 | 0.01 |
| 1409115 | 98 | 67 | 32 | 10 | 7 | 0.08 |
| 1409180 | 91 | 88 | 57 | 27 | 11 | 0.17 |
| 1409213 | 85 | 56 | 16 | 5 | 5 | 0.04 |
| 1409461 | 102 | 73 | 39 | 14 | 7 | 0.11 |
| 1409769 | 87 | 72 | 45 | 18 | 11 | 0.10 |
| 1409872 | 104 | 76 | 46 | 16 | 5 | 0.12 |
| 1409971 | 95 | 90 | 59 | 32 | 16 | 0.22 |
| 1410032 | 98 | 69 | 32 | 11 | 5 | 0.08 |
| 1410209 | 97 | 89 | 63 | 25 | 10 | 0.18 |
| 1410442 | 102 | 82 | 58 | 27 | 12 | 0.18 |
| 1410585 | 87 | 60 | 20 | 7 | 5 | 0.05 |
| 1411429 | 104 | 63 | 29 | 12 | 8 | 0.09 |

TABLE 30
Dose-dependent reduction of human PSD3 RNA in A431 cells
by modified oligonucleotides

| Compound | PSD3 RNA (% UTC) RTS41435 | | | | | IC₅₀ |
|---|---|---|---|---|---|---|
| No. | 8 nM | 31 nM | 125 nM | 500 nM | 2000 nM | (μM) |
| 1173403 | 88 | 47 | 17 | 8 | 8 | 0.04 |
| 1408265 | 105 | 77 | 46 | 20 | 11 | 0.14 |
| 1408317 | 99 | 65 | 33 | 16 | 10 | 0.09 |
| 1408318 | 78 | 42 | 13 | 10 | 9 | 0.03 |
| 1408592 | 79 | 45 | 19 | 11 | 9 | 0.03 |
| 1408636 | 96 | 89 | 62 | 28 | 14 | 0.20 |
| 1408648 | 70 | 30 | 13 | 10 | 9 | 0.01 |
| 1409347 | 101 | 63 | 34 | 17 | 10 | 0.09 |
| 1409604 | 91 | 75 | 45 | 17 | 9 | 0.11 |
| 1409606 | 99 | 74 | 36 | 16 | 8 | 0.10 |
| 1409707 | 86 | 80 | 37 | 13 | 7 | 0.09 |
| 1409729 | 95 | 60 | 27 | 13 | 9 | 0.07 |
| 1409984 | 111 | 86 | 54 | 24 | 12 | 0.19 |
| 1410223 | 95 | 62 | 20 | 8 | 6 | 0.06 |
| 1411365 | 87 | 59 | 21 | 10 | 7 | 0.05 |

TABLE 31
Dose-dependent reduction of human PSD3 RNA in A431 cells
by modified oligonucleotides

| Compound | PSD3 RNA (% UTC) RTS41435 | | | | | IC₅₀ |
|---|---|---|---|---|---|---|
| No. | 8 nM | 31 nM | 125 nM | 500 nM | 2000 nM | (μM) |
| 1173403 | 81 | 47 | 12 | 7 | 8 | 0.03 |
| 1408264 | 103 | 83 | 45 | 17 | 10 | 0.14 |
| 1408316 | 79 | 35 | 8 | 7 | 6 | 0.02 |
| 1408514 | 96 | 77 | 40 | 18 | 13 | 0.12 |
| 1408644 | 77 | 40 | 12 | 9 | 9 | 0.02 |
| 1408723 | 97 | 74 | 49 | 15 | 8 | 0.11 |
| 1409139 | 98 | 86 | 59 | 26 | 11 | 0.18 |
| 1409189 | 86 | 240 | 53 | 21 | 10 | 0.41 |
| 1409340 | 89 | 77 | 44 | 14 | 7 | 0.10 |
| 1409863 | 101 | 76 | 57 | 22 | 9 | 0.15 |
| 1410419 | 92 | 68 | 40 | 13 | 8 | 0.09 |
| 1410534 | 94 | 89 | 55 | 22 | 11 | 0.16 |
| 1411286 | 88 | 64 | 38 | 16 | 10 | 0.08 |
| 1411398 | 66 | 30 | 12 | 8 | 8 | 0.01 |
| 1411402 | 93 | 70 | 34 | 15 | 7 | 0.09 |

### Example 3: Dose-Dependent Inhibition of Human PSD3 in A431 Cells by Modified Oligonucleotides

[0478] Modified oligonucleotides selected from the example above were tested at various doses in A431 cells. Cells plated at a density of 20,000 cells per well were treated using free uptake with various concentrations of modified oligonucleotide as specified in the tables below. After a treatment period of approximately 48 hours, total RNA was isolated from the cells and PSD3 RNA levels were measured by quantitative real-time RTPCR. Human PSD3 primer-probe set RTS41435 (described herein above) was used to measure RNA levels. PSD3 RNA levels were normalized to total RNA content, as measured by RIBOGREEN®. Reduction of PSD3 RNA is presented in the table below as percent PSD3 RNA, relative to untreated control cells (% UTC).

[0479] The half maximal inhibitory concentration (IC₅₀) of each modified oligonucleotide was calculated using a linear regression on a log/linear plot of the data in Excel and is also presented in the table below.

TABLE 32
Dose-dependent reduction of human PSD3 RNA in A431 cells by modified oligonucleotides

| Compound | PSD3 RNA (% UTC) | | | | | | | | | | IC₅₀ |
|---|---|---|---|---|---|---|---|---|---|---|---|
| No. | 3 nM | 7 nM | 16 nM | 41 nM | 102 nM | 256 nM | 640 nM | 1600 nM | 4000 nM | 10000 nM | (μM) |
| 1441256 | 110 | 79 | 58 | 61 | 26 | 9 | 4 | 2 | 2 | 2 | 0.05 |
| 1441259 | 76 | 108 | 40 | 10 | 2 | 2 | 2 | 2 | 2 | 3 | 0.02 |
| 1441340 | 82 | 47 | 19 | 8 | 3 | 2 | 2 | 2 | 2 | 2 | <0.003 |
| 1441646 | 63 | 79 | 28 | 7 | 3 | 2 | 2 | 2 | 3 | 3 | 0.003 |
| 1441649 | 90 | 89 | 73 | 43 | 12 | 4 | 2 | 2 | 2 | 2 | 0.04 |
| 1441650 | 79 | 75 | 30 | 10 | 2 | 1 | 2 | 2 | 27 | 3 | 0.01 |
| 1441878 | 126 | 110 | 65 | 22 | 6 | 2 | 8 | 2 | 24 | 3 | 0.06 |

TABLE 33
Dose-dependent reduction of human PSD3 RNA in A431 cells by modified oligonucleotides

| Compound | PSD3 RNA (% UTC) | | | | | | | | | | IC₅₀ |
|---|---|---|---|---|---|---|---|---|---|---|---|
| No. | 3 nM | 7 nM | 16 nM | 41 nM | 102 nM | 256 nM | 640 nM | 1600 nM | 4000 nM | 10000 nM | (μM) |
| 1441582 | 100 | 69 | 54 | 18 | 3 | 3 | 2 | 2 | 2 | 2 | 0.02 |
| 1441583 | 79 | 68 | 55 | 23 | 7 | 2 | 1 | 2 | 1 | 1 | 0.01 |
| 1441589 | 76 | 62 | 39 | 16 | 4 | 2 | 1 | 2 | 2 | 2 | 0.01 |
| 1441591 | 78 | 111 | 70 | 35 | 17 | 5 | 2 | 2 | 2 | 2 | 0.04 |
| 1441622 | 105 | 79 | 65 | 20 | 5 | 1 | 2 | 2 | 2 | 2 | 0.03 |
| 1441626 | 109 | 60 | 34 | 11 | 7 | 4 | 3 | 2 | 3 | 2 | 0.01 |
| 1441631 | 97 | 65 | 31 | 6 | 2 | 1 | 1 | 1 | 2 | 1 | 0.01 |

TABLE 34
Dose-dependent reduction of human PSD3 RNA in A431 cells by modified oligonucleotides

| Compound | PSD3 RNA (% UTC) | | | | | | | | | | IC₅₀ |
|---|---|---|---|---|---|---|---|---|---|---|---|
| No. | 3 nM | 7 nM | 16 nM | 41 nM | 102 nM | 256 nM | 640 nM | 1600 nM | 4000 nM | 10000 nM | (μM) |
| 1441382 | 110 | 75 | 60 | 26 | 6 | 4 | 2 | 3 | 5 | 4 | 0.03 |
| 1441422 | 70 | 139 | 151 | 24 | 14 | 5 | 3 | 3 | 3 | 6 | 0.09 |
| 1441439 | 108 | 65 | 47 | 18 | 5 | 5 | 4 | 4 | 3 | 3 | 0.02 |
| 1441460 | 40 | 130 | 103 | 33 | 11 | 9 | 5 | 3 | 3 | 3 | 0.04 |
| 1441727 | 153 | 83 | 72 | 35 | 6 | 4 | 4 | 3 | 6 | 6 | 0.08 |
| 1441742 | 108 | 100 | 50 | 22 | 4 | 3 | 2 | 3 | 4 | 3 | 0.03 |
| 1441917 | 153 | 123 | 107 | 41 | 17 | 4 | 3 | 3 | 3 | 35 | 0.15 |

TABLE 35
Dose-dependent reduction of human PSD3 RNA in A431 cells by modified oligonucleotides

| Compound | PSD3 RNA (% UTC) | | | | | | | | | | IC₅₀ |
|---|---|---|---|---|---|---|---|---|---|---|---|
| No. | 3 nM | 7 nM | 16 nM | 41 nM | 102 nM | 256 nM | 640 nM | 1600 nM | 4000 nM | 10000 nM | (μM) |
| 1441454 | 153 | 119 | 99 | 36 | 20 | 6 | 4 | 4 | 5 | 7 | 0.12 |
| 1441459 | 116 | 84 | 71 | 45 | 17 | 9 | 6 | 5 | 7 | 9 | 0.06 |
| 1441672 | 120 | 67 | 71 | 18 | 4 | 2 | 1 | 2 | 1 | 1 | 0.03 |
| 1441704 | 67 | 135 | 63 | 40 | 8 | 4 | 2 | 3 | 3 | 6 | 0.04 |
| 1441738 | 86 | 114 | 105 | 41 | 13 | 4 | 2 | 3 | 3 | 2 | 0.07 |
| 1441744 | 100 | 69 | 45 | 11 | 4 | 3 | 3 | 3 | 7 | 7 | 0.01 |
| 1441916 | 110 | 92 | 84 | 39 | 15 | 3 | 3 | 2 | 3 | 5 | 0.06 |

TABLE 36
Dose-dependent reduction of human PSD3 RNA in A431 cells by modified oligonucleotides

| Compound | PSD3 RNA (% UTC) | | | | | | | | | | IC₅₀ |
|---|---|---|---|---|---|---|---|---|---|---|---|
| No. | 3 nM | 7 nM | 16 nM | 41 nM | 102 nM | 256 nM | 640 nM | 1600 nM | 4000 nM | 10000 nM | (μM) |
| 1441381 | 201 | 123 | 51 | 24 | 16 | 6 | 4 | 4 | 3 | 6 | 0.12 |
| 1441441 | 101 | 68 | 32 | 16 | 8 | 3 | 4 | 2 | 4 | 4 | 0.01 |
| 1441444 | 132 | 92 | 81 | 28 | 17 | 6 | 4 | 4 | 5 | 4 | 0.07 |
| 1441554 | 99 | 109 | 67 | 12 | 4 | 3 | 3 | 2 | 2 | 2 | 0.04 |
| 1441555 | 104 | 106 | 50 | 28 | 7 | 3 | 2 | 2 | 2 | 2 | 0.04 |
| 1441715 | 119 | 124 | 80 | 28 | 15 | 4 | 3 | 3 | 4 | 4 | 0.08 |
| 1441906 | 81 | 73 | 65 | 47 | 16 | 5 | 3 | 4 | 3 | 4 | 0.03 |

TABLE 37
Dose-dependent reduction of human PSD3 RNA in A431 cells by modified oligonucleotides

| Compound | PSD3 RNA (% UTC) | | | | | | | | | | IC₅₀ |
|---|---|---|---|---|---|---|---|---|---|---|---|
| No. | 3 nM | 7 nM | 16 nM | 41 nM | 102 nM | 256 nM | 640 nM | 1600 nM | 4000 nM | 10000 nM | (μM) |
| 1441251 | 124 | 105 | 46 | 12 | 4 | 2 | 4 | 4 | 5 | 6 | 0.04 |
| 1441530 | 81 | 52 | 25 | 13 | 7 | 5 | 5 | 4 | 2 | 3 | 0.00 |
| 1441531 | 94 | 52 | 37 | 10 | 8 | 3 | 2 | 3 | 3 | 3 | 0.01 |
| 1441769 | 160 | 57 | 83 | 31 | 10 | 4 | 3 | 3 | 2 | 2 | 0.06 |
| 1441804 | 126 | 132 | 74 | 35 | 28 | 9 | 3 | 3 | 3 | 3 | 0.10 |
| 1441954 | 106 | 111 | 79 | 46 | 13 | 5 | 4 | 3 | 4 | 6 | 0.07 |
| 1441981 | 126 | 125 | 107 | 77 | 24 | 6 | 5 | 5 | 4 | 6 | 0.15 |

TABLE 38
Dose-dependent reduction of human PSD3 RNA in A431 cells by modified oligonucleotides

| Compound | PSD3 RNA (% UTC) | | | | | | | | | | IC₅₀ |
|---|---|---|---|---|---|---|---|---|---|---|---|
| No. | 3 nM | 7 nM | 16 nM | 41 nM | 102 nM | 256 nM | 640 nM | 1600 nM | 4000 nM | 10000 nM | (μM) |
| 1441479 | 108 | 92 | 37 | 7 | 3 | 3 | 2 | 2 | 2 | 3 | 0.02 |
| 1441523 | 157 | 102 | 64 | 25 | 12 | 4 | 3 | 3 | 3 | 4 | 0.08 |
| 1441532 | 90 | 86 | 106 | 15 | 4 | 4 | 3 | 3 | 3 | 3 | 0.04 |
| 1441544 | 148 | 77 | 59 | 15 | 8 | 5 | 4 | 5 | 5 | 5 | 0.05 |
| 1441767 | 113 | 109 | 39 | 36 | 17 | 6 | 4 | 3 | 3 | 4 | 0.05 |
| 1441776 | 140 | 126 | 61 | 30 | 6 | 3 | 4 | 3 | 4 | 5 | 0.08 |
| 1441992 | 113 | 106 | 93 | 69 | 29 | 7 | 3 | 2 | 3 | 4 | 0.10 |
| 1442130 | 88 | 70 | 41 | 16 | 8 | 4 | 4 | 2 | 3 | 28 | 0.01 |

TABLE 39
Dose-dependent reduction of human PSD3 RNA in A431 cells by modified oligonucleotides

| Compound | PSD3 RNA (% UTC) | | | | | | | | | | IC₅₀ |
|---|---|---|---|---|---|---|---|---|---|---|---|
| No. | 3 nM | 7 nM | 16 nM | 41 nM | 102 nM | 256 nM | 640 nM | 1600 nM | 4000 nM | 10000 nM | (μM) |
| 1441386 | 75 | 79 | 46 | 23 | 13 | 2 | 2 | 2 | 2 | 2 | 0.01 |
| 1441420 | 92 | 96 | 46 | 22 | 5 | 3 | 2 | 1 | 1 | 1 | 0.02 |
| 1441430 | 83 | 72 | 42 | 16 | 5 | 2 | 1 | 2 | 2 | 2 | 0.01 |
| 1441433 | 121 | 70 | 64 | 48 | 24 | 9 | 4 | 2 | 2 | 2 | 0.05 |
| 1441440 | 88 | 52 | 27 | 13 | 6 | 4 | 2 | 2 | 2 | 2 | 0.01 |
| 1441443 | 81 | 67 | 38 | 14 | 5 | 2 | 2 | 1 | 1 | 1 | 0.01 |
| 1441671 | 124 | 78 | 56 | 30 | 8 | 3 | 2 | 2 | 1 | 1 | 0.04 |

TABLE 40
Dose-dependent reduction of human PSD3 RNA in A431 cells by modified oligonucleotides

| Compound | PSD3 RNA (% UTC) | | | | | | | | | | IC₅₀ |
|---|---|---|---|---|---|---|---|---|---|---|---|
| No. | 3 nM | 7 nM | 16 nM | 41 nM | 102 nM | 256 nM | 640 nM | 1600 nM | 4000 nM | 10000 nM | (μM) |
| 1441363 | 80 | 91 | 47 | 13 | 4 | 2 | 2 | 1 | 2 | 2 | 0.01 |
| 1441442 | 90 | 49 | 19 | 9 | 3 | 1 | 2 | 1 | 1 | 1 | 0.003 |
| 1441455 | 108 | 88 | 28 | 9 | 3 | 2 | 2 | 3 | 3 | 4 | 0.02 |
| 1441673 | 88 | 130 | 45 | 21 | 7 | 2 | 1 | 1 | 1 | 1 | 0.03 |
| 1441713 | 87 | 78 | 63 | 45 | 22 | 7 | 3 | 2 | 2 | 2 | 0.03 |
| 1441730 | 104 | 62 | 51 | 29 | 9 | 4 | 3 | 2 | 3 | 2 | 0.02 |
| 1441908 | 111 | 81 | 70 | 44 | 30 | 10 | 4 | 3 | 3 | 3 | 0.06 |

### Example 4: Design of Modified Oligonucleotides Complementary to a Human PSD3 Nucleic Acid

[0480] Modified oligonucleotides complementary to a human PSD3 nucleic acid were designed and synthesized. “Start site” indicates the 5′-most nucleoside to which the modified oligonucleotide is complementary in the target nucleic acid sequence. “Stop site” indicates the 3′-most nucleoside to which the modified oligonucleotide is complementary in the target nucleic acid sequence. Each modified oligonucleotide listed in the table below is 100% complementary to SEQ ID NO: 1 (described herein above), to SEQ ID NO: 2 (described herein above), or to both. “N/A” indicates that the modified oligonucleotide is not 100% complementary to that particular target nucleic acid sequence.

[0481] The modified oligonucleotides in Table 41 below are 3-10-3 cEt modified oligonucleotides with uniform phosphorothioate internucleoside linkages. The modified oligonucleotides are 16 nucleosides in length, wherein the central gap segment consists of ten 2′-β-D-deoxynucleosides, and wherein the 5′ and 3′ wing segments each consist of three cEt nucleosides. The sugar motif for the modified oligonucleotides is (from 5′ to 3′): kkkddddddddddkkk; wherein each “d” represents a 2′-β-D-deoxyribosyl sugar moiety, and each “k” represents a cEt modified sugar moiety. The internucleoside linkage motif for the modified oligonucleotides is (from 5′ to 3′): sssssssssssssss; wherein each “s” represents a phosphorothioate internucleoside linkage. Each cytosine residue is a 5-methylcytosine.

[0482] The modified oligonucleotides in the table below are all conjugated to a THA-C6-GalNAc₃ conjugate (designated as [THA-GalNAc-]) at the 5′ end of the modified oligonucleotide. THA-GalNAc is represented by the structure below, wherein the phosphate group is attached to the 5′-oxygen atom of the 5′-nucleoside:

[chemical structure]

TABLE 41
GalNAc conjugated 3-10-3 cEt modified oligonucleotides with uniform
phosphorothioate internucleoside linkages complementary to human PSD3

| | SEQ ID | SEQ ID | SEQ ID | SEQ ID | | |
|---|---|---|---|---|---|---|
| Compound | NO: 1 | NO: 1 | NO: 2 | NO: 2 | | SEQ |
| No. | Start Site | Stop Site | Start Site | Stop Site | Sequence (5′ to 3′) | ID NO |
| 1436573 | 288680 | 288695 | 2075 | 2090 | THA-GalNAc- | 260 |
| | | | | | ATCTATTGGAGAAGTG | |
| 1454924 | 222028 | 222043 | 1438 | 1453 | THA-GalNAc- | 423 |
| | | | | | GTCCAAAATGGTTTCA | |
| 1454925 | 285152 | 285167 | 1787 | 1802 | THA-GalNAc- | 461 |
| | | | | | CCAAAATTTCAGTGCT | |
| 1454928 | 285254 | 285269 | 1889 | 1904 | THA-GalNAc- | 686 |
| | | | | | ATCTTTTGAATCTGTC | |
| 1454933 | 330574 | 330589 | N/A | N/A | THA-GalNAc- | 1252 |
| | | | | | GCAAATTGTGTTCAGT | |
| 1454937 | 82205 | 82220 | N/A | N/A | THA-GalNAc- | 355 |
| | | | | | TTTCAGATATTAGCTC | |
| 1454942 | 244765 | 244780 | N/A | N/A | THA-GalNAc- | 455 |
| | | | | | GGTAATTTATGAGTTA | |
| 1454944 | 222016 | 222031 | 1426 | 1441 | THA-GalNAc- | 2471 |
| | | | | | TTCAAACTGGGAGCTG | |
| 1454945 | 181927 | 181942 | N/A | N/A | THA-GalNAc- | 449 |
| | | | | | GAATTGATAACAGGTA | |
| 1454969 | 184997 | 185012 | N/A | N/A | THA-GalNAc- | 1840 |
| | | | | | GTGTATTAGGTTTTTC | |
| 1454970 | 218085 | 218100 | 1051 | 1066 | THA-GalNAc- | 781 |
| | | | | | ATCTATAGGATGCTGG | |
| 1454972 | 463909 | 463924 | N/A | N/A | THA-GalNAc- | 1510 |
| | | | | | TCAGATTTAATAGGTC | |
| 1454974 | 291274 | 291289 | N/A | N/A | THA-GalNAc- | 1519 |
| | | | | | GAGTATTATGAAGAGT | |
| 1454980 | 344743 | 344758 | N/A | N/A | THA-GalNAc- | 648 |
| | | | | | AATTTAGTATCCTTCA | |
| 1454984 | 288681 | 288696 | 2076 | 2091 | THA-GalNAc- | 1013 |
| | | | | | TATCTATTGGAGAAGT | |
| 1454987 | 222044 | 222059 | 1454 | 1469 | THA-GalNAc- | 832 |
| | | | | | AGTATAAAGAAGTGTT | |

[0483] The modified oligonucleotides in Table 42 below are mixed cEt/MOE modified oligonucleotides with uniform phosphorothioate internucleoside linkages. The modified oligonucleotides are 16 nucleosides in length. The sugar motifs for the modified oligonucleotides are described in the column labeled “Sugar Motif (5′ to 3′)” in Table 42 below; wherein each “d” represents a 2′-β-D-deoxyribosyl sugar moiety, each “k” represents a cEt modified sugar moiety, each “y” represents a 2′-O-methylribosyl sugar moiety, and each “e” represents a 2′-MOE sugar moiety. The internucleoside linkage motif for the modified oligonucleotides is (from 5′ to 3′): sssssssssssssss; wherein each “s” represents a phosphorothioate internucleoside linkage. Each cytosine residue is a 5-methylcytosine. Each “U” represents an Uracil.

[0484] The modified oligonucleotides in the table below are all conjugated to a THA-C6-GalNAc₃ conjugate (designated as [THA-GalNAc-]) at the 5′ end of the modified oligonucleotide. THA-GalNAc is represented by the structure below, wherein the phosphate group is attached to the 5′-oxygen atom of the 5′-nucleoside:

[chemical structure]

TABLE 42
GalNAc conjugated modified oligonucleotides with uniform phosphorothioate
intemucleoside linkages complementary to human PSD3

| | SEQ ID | SEQ ID | SEQ ID | SEQ ID | | | |
|---|---|---|---|---|---|---|---|
| Compound | NO: 1 | NO: 1 | NO: 2 | NO: 2 | | Sugar Motif | SEQ |
| No. | Start Site | Stop Site | Start Site | Stop Site | Sequence (5′ to 3′) | (5′-3′) | ID NO |
| 1454999 | 218081 | 218096 | 1047 | 1062 | THA-GalNAc- | kkkdyddddddddkkk | 551 |
| | | | | | ATAGGATGCTGGGTCT | | |
| 1455000 | 217663 | 217678 | 629 | 644 | THA-GalNAc- | kkkdyddddddddkkk | 2709 |
| | | | | | GTGTUTTACGACTGGC | | |
| 1545962 | 288678 | 288693 | 2073 | 2088 | THA-GalNAc- | kkdddddddddkekek | 936 |
| | | | | | CTATTGGAGAAGTGTA | | |

### Example 5: Effect of Modified Oligonucleotides on Human PSD3 In Vitro, Multiple Doses

[0485] Modified oligonucleotides selected from the example above were tested at various doses in HepatoPac (donor LLT) cells (BiolVT; Catalog #: HUMAN00032-96). HepatoPac cells are cultured following the manufacturers Maintenance Kit instructions. Upon arrival, the HepatoPac system medium is replaced with supplemented Maintenance medium (64 ul/well) and allowed to incubate for 72 hours. After 24 hours, the medium is replaced with new media and the modified oligonucleotides in water are added at the indicated concentrations and allowed to incubate at 37° C., 10% CO2 for 48 hours. The medium is chanced one more and allowed to incubate for an additional 48 hours after which the cells are lysed for total RNA purification and analysis. PSD3 RNA levels were measured by quantitative real-time RTPCR. Human PSD3 primer-probe set LTS48177 (forward sequence GATCTGAAGGGAAAGCTCCA, designated herein as SEQ ID NO: 9; reverse sequence CCTCACCATCAAATTCCAGAGA, designated herein as SEQ ID NO: 10; probe sequence TAGGCCTTCTCCACCTTCCTCCA, designated herein as SEQ ID NO: 11) was used to measure RNA levels. PSD3 RNA levels were normalized to total RNA content, as measured by RIBOGREEN®. Reduction of PSD3 RNA is presented in the table below as percent PSD3 RNA, relative to untreated control cells (% UTC).

[0486] The half maximal inhibitory concentration (IC₅₀) of each modified oligonucleotide was calculated using Graphpad Prism (log(inhibitor) vs. normalized response—Variable slope) and is also presented in the table below.

TABLE 43
Dose-dependent reduction of human PSD3 RNA in HepatoPac cells
by modified oligonucleotides

| Compound | PSD3 RNA (% UTC) LTS48177 | | | | | | | | IC₅₀ |
|---|---|---|---|---|---|---|---|---|---|
| No. | 0.7 nM | 2 nM | 6 nM | 19 nM | 56 nM | 167 nM | 500 nM | 1500 nM | (μM) |
| 1436573 | 66 | 40 | 64 | 38 | 38 | 19 | 13 | 11 | 0.09 |
| 1454924 | 39 | 52 | 33 | 24 | 19 | 8 | 6 | 4 | 0.01 |
| 1454925 | 56 | 54 | 44 | 43 | 32 | 28 | 20 | 16 | 0.20 |
| 1454928 | 57 | 48 | 42 | 36 | 29 | 20 | 14 | 16 | 0.08 |
| 1454933 | 41 | 31 | 39 | 32 | 16 | 12 | 10 | 12 | 0.02 |
| 1454937 | 73 | 55 | 69 | 37 | 29 | 25 | 19 | 7 | 0.05 |
| 1454942 | 61 | 61 | 55 | 75 | 44 | 22 | 16 | 9 | 0.16 |
| 1454944 | 50 | 68 | 52 | 41 | 21 | 9 | 5 | 6 | 0.04 |
| 1454945 | 52 | 40 | 35 | 29 | 17 | 7 | 4 | 3 | 0.02 |
| 1454969 | 64 | 49 | 40 | 30 | 13 | 3 | 5 | 2 | 0.02 |
| 1454970 | 98 | 53 | 44 | 34 | 33 | 13 | 4 | 3 | 0.04 |
| 1454972 | 58 | 60 | 65 | 52 | 32 | 18 | 13 | 12 | 0.11 |
| 1454974 | 64 | 60 | 55 | 37 | 30 | 21 | 13 | 12 | 0.10 |
| 1454980 | 48 | 52 | 57 | 52 | 34 | 16 | 13 | 14 | 0.10 |
| 1454984 | 50 | 48 | 55 | 37 | 28 | 14 | 10 | 14 | 0.06 |
| 1454987 | 52 | 45 | 40 | 38 | 34 | 17 | 10 | 8 | 0.05 |
| 1454999 | 52 | 60 | 61 | 57 | 41 | 42 | 13 | 11 | 0.20 |
| 1455000 | 37 | 45 | 65 | 45 | 35 | 14 | 9 | 10 | 0.06 |
| 1545962 | 47 | 47 | 46 | 32 | 29 | 16 | 15 | 16 | 0.05 |

### Example 6: Effect of Modified Oligonucleotides on Human PSD3 In Vitro, Multiple Doses

[0487] Modified oligonucleotides selected from the example above were tested at various doses in SH-SY5Y cells. Cells plated at a density of 20,000 cells per well were treated using electroporation with various concentrations of modified oligonucleotide as specified in the table below. After a treatment period of approximately 24 hours, total RNA was isolated from the cells and PSD3 RNA levels were measured by quantitative real-time RTPCR. Human PSD3 primer-probe set RTS41435 (described herein above) was used to measure RNA levels. PSD3 RNA levels were normalized to total RNA content, as measured by GAPDH. Human GAPDH was measured using the human primer-probe set RTS 104 (forward sequence GAAGGTGAAGGTCGGAGTC, designated herein as SEQ TD NO: 12; reverse sequence GAAGATGGTGATGGGATTTC, designated herein as SEQ ID NO: 13; probe sequence CAAGCTTCCCGTTCTCAGCC, designated herein as SEQ ID NO: 14). Reduction of PSD3 RNA is presented in the table below as percent PSD3 RNA, relative to untreated control cells (% UTC).

[0488] The half maximal inhibitory concentration (IC₅₀) of each modified oligonucleotide was calculated using Graphpad Prism (log(inhibitor) vs. normalized response—Variable slope) and is also presented in the table below.

TABLE 44
Dose-dependent reduction of human PSD3 RNA in SH-SY5Y cells by modified oligonucleotides

| Compound | PSD3 RNA (% UTC) RTS41435 | | | | | | | | | | IC₅₀ |
|---|---|---|---|---|---|---|---|---|---|---|---|
| No. | 5 nM | 13 nM | 33 nM | 82 nM | 205 nM | 512 nM | 1280 nM | 3200 nM | 8000 nM | 20000 nM | (μM) |
| 1173404 | 93 | 89 | 84 | 61 | 46 | 34 | 19 | 14 | 10 | 4 | 0.19 |
| 1410176 | 134 | 80 | 88 | 72 | 69 | 39 | 19 | 10 | 4 | 4 | 0.33 |
| 1408282 | 112 | 109 | 114 | 78 | 63 | 30 | 31 | 18 | 12 | 10 | 0.38 |
| 1410297 | 76 | 84 | 79 | 71 | 56 | 58 | 25 | 15 | 12 | 10 | 0.32 |
| 1408305 | 91 | 101 | 94 | 75 | 66 | 58 | 27 | 23 | 14 | 5 | 0.55 |
| 1410387 | 121 | 110 | 95 | 92 | 71 | 46 | 19 | 19 | 13 | 6 | 0.48 |
| 1408375 | 84 | 103 | 86 | 90 | 75 | 50 | 36 | 31 | 17 | 8 | 0.74 |
| 1410423 | 95 | 103 | 75 | 78 | 52 | 35 | 16 | 6 | 4 | 2 | 0.24 |
| 1409092 | 108 | 100 | 79 | 62 | 32 | 30 | 14 | 5 | 4 | 2 | 0.14 |
| 1410436 | 110 | 107 | 94 | 96 | 77 | 60 | 40 | 15 | 3 | 3 | 0.76 |
| 1409495 | 92 | 98 | 80 | 67 | 58 | 42 | 36 | 16 | 11 | 6 | 0.33 |
| 1411113 | 102 | 97 | 90 | 81 | 77 | 49 | 24 | 24 | 7 | 1 | 0.52 |
| 1409859 | 81 | 92 | 116 | 98 | 70 | 46 | 27 | 23 | 16 | 4 | 0.58 |
| 1411398 | 92 | 97 | 96 | 84 | 55 | 29 | 15 | 6 | 4 | 4 | 0.26 |

### Example 7: Effect of Modified Oligonucleotides on Human PSD3 In Vitro, Multiple Doses

[0489] Modified oligonucleotides selected from the example above were tested at various doses in A431 cells. Cells plated at a density of 10,000 cells per well were treated using free uptake with various concentrations of modified oligonucleotide as specified in the tables below. After a treatment period of approximately 48 hours, total RNA was isolated from the cells and PSD3 RNA levels were measured by quantitative real-time RTPCR. Human PSD3 primer-probe set RTS41435 (described herein above) was used to measure RNA levels. PSD3 RNA levels were normalized to total RNA content, as measured by GAPDH. Human GAPDH was measured using the human primer-probe set RTS 104 (described herein above). Reduction of PSD3 RNA is presented in the tables below as percent PSD3 RNA, relative to untreated control cells (% UTC).

[0490] The half maximal inhibitory concentration (IC₅₀) of each modified oligonucleotide was calculated using Graphpad Prism (log(inhibitor) vs. normalized response—Variable slope) and is also presented in the tables below.

TABLE 45
Dose-dependent reduction of human PSD3 RNA in A431 cells by modified oligonucleotides

| Compound | PSD3 RNA (% UTC) RTS41435 | | | | | | | | | | IC₅₀ |
|---|---|---|---|---|---|---|---|---|---|---|---|
| No. | 0.4 nM | 1 nM | 3.7 nM | 11 nM | 33 nM | 99 nM | 296 nM | 889 nM | 2667 nM | 8000 nM | (μM) |
| 1173404 | 103 | 122 | 102 | 66 | 25 | 11 | 5 | 6 | 3 | 4 | 0.02 |
| 1408282 | 102 | 101 | 91 | 52 | 20 | 15 | 10 | 9 | 8 | 6 | 0.01 |
| 1408305 | 83 | 84 | 81 | 69 | 34 | 12 | 6 | 4 | 4 | 3 | 0.02 |
| 1408375 | 119 | 115 | 95 | 94 | 33 | 12 | 6 | 5 | 6 | 6 | 0.03 |
| 1409092 | 103 | 109 | 66 | 19 | 4 | 4 | 5 | 4 | 2 | 3 | 0.01 |
| 1409495 | 88 | 80 | 65 | 36 | 18 | 8 | 6 | 5 | 4 | 4 | 0.01 |
| 1409859 | 100 | 73 | 74 | 44 | 21 | 9 | 7 | 4 | 3 | 2 | 0.01 |
| 1410176 | 79 | 70 | 72 | 38 | 15 | 9 | 7 | 5 | 2 | 4 | 0.01 |
| 1410297 | 83 | 91 | 70 | 60 | 21 | 7 | 2 | 3 | 2 | 2 | 0.01 |
| 1410387 | 84 | 65 | 50 | 20 | 8 | 3 | 4 | 3 | 2 | 3 | 0.003 |
| 1410423 | 105 | 67 | 44 | 25 | 9 | 6 | 6 | 6 | 2 | 5 | 0.003 |
| 1410436 | 109 | 90 | 76 | 62 | 20 | 11 | 8 | 6 | 4 | 3 | 0.01 |
| 1411113 | 97 | 96 | 90 | 69 | 29 | 13 | 6 | 6 | 4 | 4 | 0.02 |
| 1411398 | 95 | 84 | 58 | 34 | 13 | 7 | 6 | 3 | 5 | 3 | 0.01 |

TABLE 46
Dose-dependent reduction of human PSD3 RNA in A431 cells by modified oligonucleotides

| Compound | PSD3 RNA (% UTC) RTS41435 | | | | | | | | | | IC₅₀ |
|---|---|---|---|---|---|---|---|---|---|---|---|
| No. | 0.4 nM | 1 nM | 3.7 nM | 11 nM | 33 nM | 99 nM | 296 nM | 889 nM | 2667 nM | 8000 nM | (μM) |
| 1441259 | 107 | 96 | 76 | 52 | 15 | 9 | 9 | 5 | 6 | 5 | 0.01 |
| 1441363 | 96 | 87 | 63 | 38 | 17 | 6 | 6 | 6 | 5 | 5 | 0.01 |
| 1441430 | 85 | 82 | 78 | 56 | 21 | 10 | 7 | 5 | 4 | 4 | 0.01 |
| 1441439 | 95 | 86 | 61 | 35 | 18 | 8 | 9 | 6 | 8 | 8 | 0.01 |
| 1441589 | 96 | 99 | 84 | 44 | 16 | 5 | 7 | 6 | 6 | 5 | 0.01 |
| 1441591 | 97 | 80 | 76 | 64 | 40 | 17 | 8 | 4 | 4 | 9 | 0.02 |
| 1441649 | 102 | 85 | 90 | 65 | 34 | 12 | 13 | 5 | 4 | 5 | 0.02 |
| 1441727 | 91 | 95 | 90 | 46 | 20 | 6 | 4 | 4 | 4 | 4 | 0.01 |
| 1442130 | 115 | 111 | 92 | 78 | 32 | 8 | 5 | 4 | 3 | 3 | 0.02 |

### Example 8: Activity of Modified Oligonucleotides Complementary to Human PSD3 in Humanized Mice, Multiple Dose

[0491] Humanized FRG® KO mice (Yecuris Tualatin, OR) were used to determine activity of modified oligonucleotides complementary to human PSD3. The FRG KO mouse are severely immunocompromised, fumarylacetoacetate hydrolase (FAH)-deficient mice that allows for engraftment of human primary hepatocytes (up to 90%) into the mouse liver. The humanized liver of this mouse model allows for in vivo activity characterization for ASOs targeting human transcripts.

### Treatment

[0492] Humanized FRG® KO mice were divided into groups of three mice each. Each mouse received subcutaneous injections of modified oligonucleotide at various doses indicated in the tables below twice a week for two and a half weeks (a total of 5 treatments). One group of seven mice received subcutaneous injections of PBS twice a week for two and a half weeks (a total of 5 treatments). The PBS-injected group served as the control group to which oligonucleotide-treated groups were compared.

### RNA Analysis

[0493] 48 hours post the final treatment, mice were sacrificed, and RNA was extracted from mouse liver, for real-time RTPCR analysis of PSD3 RNA expression. Human PSD3 primer probe set LTS48178 (forward sequence TGAATGATGCCAGCGACTC, designated herein as SEQ ID NO: 15; reverse sequence CTTCTAGCCGTGTTGTTTTCAC, designated herein as SEQ ID NO: 16; probe sequence AAAGCAATCTCCGGGGTGCCT, designated herein as SEQ ID NO: 17) was used to measure human PSD3 RNA levels as indicated in the table below. PSD3 RNA levels were normalized to total RNA content, as measured by GAPDH. Human GAPDH was measured using the human primer-probe set Hs99999905 ml (Thermo Fisher Scientific). Results are presented as percent PSD3 RNA, relative to PBS control (% control). ED50s were calculated in Prism using nonlinear fit with variable slope (four parameter), top constrained to 100% (or 1), bottom constrained to 0.

Y=Bottom+(Top−Bottom)/(1+(IC50/X)\hat{ }HillSlope).

TABLE 47
Reduction of human PSD3 in transgenic mice

| | | Liver | |
|---|---|---|---|
| | | PSD3 RNA | ED50 |
| Compound No. | Dose (mpk) | (% control) | (mpk) |
| PBS | 0 | 100 | — |
| 1436573 | 0.04 | 96 | 0.35 |
| | 0.15 | 77 | |
| | 0.60 | 31 | |
| | 2.40 | 8 | |
| 1454945 | 0.04 | 101 | 0.42 |
| | 0.15 | 89 | |
| | 0.60 | 32 | |
| | 2.40 | 8 | |
| 1454987 | 0.04 | 98 | 0.52 |
| | 0.15 | 86 | |
| | 0.60 | 40 | |
| | 2.40 | 20 | |
| 1545962 | 0.15 | 85 | 0.37 |
| | 0.60 | 27 | |
| | 2.40 | 12 | |

The application's sequence listing, which the Patent Office published only in electronic form, follows.

SEQUENCE LISTING (3041 sequences)

SEQ ID NO: 1 - DNA, 566000 bp, Homo sapiens
  source 1..566000: mol_type = genomic DNA
cctcggcctcccaaagtgctaagattacaggcctgagccactgcacccggccaactttttttataggtagaaggagtacactctaaaatcatgataaaaaagtaaatacataaaccagtaacatagttgtttatgatcaagtgttacatactatagtacgtattatcaagtattacgtaatatacataattgcatacaattgtatgtgcctggcagcatagtggtttgtttacaccagcatcatcggtgatgcactgtgctatgacattacgacagtgaccacatcactagatgacaggaatttttcagctccattttaatcttatgggaccacccatcactagccgaaatgtcatgtggtgtgtgaccttacatcagttttatgtttacaaagtattcctacatagattatcccatttgacctgcaaaacaattccataaggtaggaagggcagaaatttactccattgtgttaaaataatgtccactgaggttcaaatttgttgtgagtcacagctaaagattagttactccagaactcagacccatttccccgaccccaactcccttgctgaccctcctacatcccaattaattcctcagcccttaggtgctttcccatcagacaggaagcatgaaaacatgcatgtaattacccgttgcaggttaaaaaaattatacatttcatgaaacaactcaaattgttctgttgggtgaacaagttttctccaggataacatgtggatctaaattctaaaagtaactaacatttattttacagaaccgattaggtagcaggcaatatgctaaggaagccttttgcacctgcacttaatcttcacaacagcccttgaaagtagctatttttttttaacttttattttaagttcaggagtacacgtgcaggtttgttatataggtaaacttgtgtcctgggggtttgttgtacagattattttgtcacccagtattaagcctatacccaatagttatttttcctgatcctctccctcctcccactctccactctccaataggccccagtgtgtgttgttcccctctatgtgcccatgtgttctcatcacttagcttctacttatgagtgagaacatgcagtaattggttttctgttcttgtgttagtatatgaacacttttcaaaagaagacacacatgtggccaacaactatacgaaaaaagctcaacatcactgatcattagagaaacgcaaatcaaaaccacaataagataccatctcacatgtgtcagaatagctattattaaaaaggaagtagctattgttacttcatcttagagaagaggacctgattgtcaaaaaggccaagtaaattattgatatggtttgactatgtccccacccaaatctcatcttgaactgtagttcccataatcccccatgtgtcacaggagggatccaatgggaagtgacggaatcatgggggtggttacctccatgctgttctcgtgatattgagttctcacaagatctgatggttttataagaggcttttcccttctttgctctacacttctccttgctgccaccatgtgaaggacatgtttgcttccccttctgccatgattgtaagtttcatgaggcctccccagccctccagaactgtgagtcaattaaacctctttcctttataaattactcagtctctagtatgtctttatcagcagcatgagaccagactaatacacttgcctaaggtcacacagccacacagtggaagcagggctaagaaatgtctgtgtggcaccaaagtctgtgctctcaaatcactctgctgtttactcatgtttctctggcactttcccccacatctcacacagagctcccaccccctaaatgcgcctcctaatacttaagggtgtcccaaggaaatgcgttacatgaatcctccaagtcagccctcctgtcagctctcaagtgtcatccaccatttatttacccttctcctatttcagtccacacaacccagaaatgaaatattgggcagtaatccccactgtggtgagcttgcaaataaaaagaagacagaagtgccctggacacgctaccagcaccaccatggtttccttggtactttacttcatgtggtttagaagttggatgtttgaaatggaaagaggtgaaggagtgaaacttctcatccgacagctttttaaagcccctgcctacttggggcagttgtgccttccctgagcttcacattccttaactgcaacatagaaatgatgccacctacttcacaggattgtgctgtgccttgaatgaaatacactatgcaaagcccctgatgtcatgcttggtaccttcagaaggtttcttctcacccaaattcctgttccctatgaagacatagtttcccatgttactggcagttaatcagtcaacacgcagtactgtttgttgagcgattacaatgttcagacaagttcttgtatagaagagtgtgaaaattacctatagaggactagtcatcacttatgtaaaatgttttatgaacattaatgtaatgagatcaacatacaattacagttagacataatatggttttgtcaaaattttctttgtagatgtgataaaaaggattatagcagccggtgcctggcctaaacagatttgagcacatttctaaatgagatgtagattgagtcacttgccagctattggaaatgtgggcaaaacctccttgacctttggtgaaaaaacttttaaagtatgaagacgtttaacaaggaaaactatcataagactccaactgggcatcctggcatcctgagaatttccaaggattcagcctggtcagccacggtcagccaaggccagtggcccctgatgcctcaggggtgctgcccgtgtgcggggatactgaggagtcagggagggagaattcacccaggcttcacatgatgctgcatgcagagcaaggaagttctagaccacatgctcactttgttttggaggatgatttcctggttcccttttagtcaagttatttcacattgacgaagactagagctttctcacacctgccttctttcctcctcaggtacagggtcagcatgactcaaaaagattcctttccccctaagaggtactgagcctatagaaatactctgaatgtgagtgagtcaactgaattttaaggtgatttcttttcttcttccttttgtctcattttttatttattatacttttcaattgcctattacaatttgctaaaaagaaatgatctccatttttaaaaagcactgccatgttctcacaagttaaaagattagattatttttttctttcctctaattaagatgggctaaattatttttcaaaacaacaaaaacaacaacaacaaaaagcccttccagcctgatttgttacctggatttttttttttaatcttatttcttctttctctcttctttcatgtttttcttttttcttagttttttctttctttttcttcctttctttccttctttctttctctctctttctttctttttcttccttccttccttcctctctttttctttttcccttacttccttcttccttccctccctccctccctccttccttccttccttccctccttccttctttcttccttttctctctcttactttctttgatgctaagtgtcttctgcacagctgcaacaatataccactttcttttcattttgtggggtaataccaaatttctttcatgctgctctaagaaaataccatagactgggtaatttataaagaagtgaaatttggtttctcacagttctggggactgggaagtccaagatcaaggcacctggtgcctcgtctggtgaggactttgtcctctggaggggaggaatactgtgtcctcattgggtggaaggcagaagggcaacctactgctcaacagctgtgtgaaacttcttttataagggtcttaatcccattcatgaaggaaggcaccttcaggatccaattgcctctgaaaggtcccacctgttaatactatcacattggcagcaccagaattttggaggagacacaaaccatgacaccaagtattttgatgtgggacctctcctacagaacccataaatgaccacagatttaaagtgcaaactcatgaaaacattaaagttgcttacaactgtttgttgcgcactttatcctagaggtcttaaaagtatttagtaaaaataatgcagacaaagtagatgaaaagtacacttcaaagcttattggaggcttcatttataaaccagtgtctcacaggtcagtcaccaagtaacaagaacagctaacacagaatttaggattaaattatgaaatgaatagtgttttcatttcaaataggaggaagggggcagtgaagaaaaagtgattccatgtagatacacaaaggtgagagggggccggccgcagtggctcacacctgtaatcccagcactttgggaggccgaggtggggcggatggatcacctgaggtcaggagttcaagaccagcctggccaacatggcaaaaccccgtctctactaaaaagtacaaaaattaggtgggtgcggtggcgcgtgcctgtaatcccagctgttccggaggctgaggcagcagaatcactaaaacctgggaggcggaggttgcattgagctgaaatcacaccactacactccaaccagaacaatagagccagactctgtctcaacaaaaacaaaaacaaagttgagaagggttgtcttgactgtcctcactgtcacccctcacttgtagattattctccactaatatctttttgtgattctgtgatataagtgcaaagtccagctccatggccaagatcattatctgacccccctattttaagactcccctgggtgctgaagacatgttgtttgcttcctcaggctgtcggtggaaccatggggctgagtcacgtctgcccacagctgctgctgttcgcatccctgggcactgaggcctgaaactccaccctggcagggaccagcccgacccccctggaggaaatggccgggcagtttcagcagcagcagatgaaaacttccttcctcttcatccagctgcgggctcctccagcctgcactctccccgccccgtctccagcggcaaccccagggggcctggaggagggacacagtttcccaagtcccaggacaggcctcttggcaggctgggacctcaggcgcacacagggctcagctgcccctcctttgaggctgctgcagaaggcaggccctgagacggaggaatcagctgctttcacttgctctgctccaaaggaaaagaaggaagggaggaaaaaatcccaggatccggacgtaagcaggggtggtgattgcagatccccacatcacaggcattgccaggcccctgcctccaagacactgggctggctacagcccctggcatggaggcttcctagcccagctcccatcatgagtgatgaaagcagcagtccctccatgggctggaagcactggccagtcacttctgccacccaggatctgtggggcatggacccccgatgcagggatgccttgggatgctcccctccaagggctgtcctggtccacgctgcagatggagcggaaaggactgtgctgaggagaggcgccgagacctgccaaatactccccaggagctgtaaggaggccacaggtaccacagcgcaggcgacaagggcatggctctacaggtactgtccagctgtgcacaccagcaagggctgcccagccccgcctgccactctgcctctcaaggtaagaactcgcatgtcctgaatcccagcagaagaaagggagccaggggacagacgtgccaccctggcctccaatttctggcgttggttctctcctctgcttagatgggccacacctcaacagcagaggtacccacgagccgcagccttcccaggcctggcatttgctctgtcctctgccaccttccaggccaccagaaacattttgtttggaagaaggcaaggattaactatttcccaagatttctgccaaagatgggaaaagaaaagtcaggcatactttataggggaacaccagaaggaaggacaaaggaggtacccagacatttattgggtcctgtgatgtgctaggcattttctcacatccccttactcatcttaaccactttgagaaatagagctccacagctccagtttcagatgaggggatggagatgtgactgggcaaacatcctccccacccttgcagaaacacaagggcaaaagcaaagcttgttctccagaatgggcattgggaacaatgggggaggctccagggagctgtggaggtttccagaaccggagcacagccttggaactcagccacaccctactgtcatccatgaacacctgactttctagggctctcatgtaccttccatctccccaacacacctagaccaccaccaaatggatgtgcagcctgggacaggagcctccattccccatcaggaagggaaaggcagccctgtgtggcctccaaggtcttttccagctctgtgggctcctgtttccagctctacgggctctgcctctgatcatggccttgcctgcccttgttgttagcatctcacactccgcacttctggcccagccttcccgttgttcttgtgcctgcagcccaccctctccacccagctcaggtgcactgttctcaaattgggtggacaaaacttaaaattatgcattcagctttcttttctcacagtgtgggcatcttgctatcctttgcatgtgtgtgagcatgagggtggaggtgaggaagggtgtggagggtggtgggatgagacggaaggaagagggagtcattggagtgttgagggttagcatggacaggaatctcagggaagtcacagaagaaatgaatgaaattcacagcatctggcaggggcctcccatgggcttagagggggtactgcgtcatccaaacaccatgccctctcctgcaggcttctcacagcacccttccttcccttttctctttttaacaagggcctgcgtagccacagttaagaaacggggagaaagctctccagagtagcgctcttggaggaagagatgctagcatgcttccttaagaaatagttcacattccatcctaattcttgcatctctcatttcctaccgggatttaggaggaatgacatactcctgcatcagagcccatctctgtatgtggggtcacacagttattgtttgtgtacttcagtgctggcctgatgacttgaaaaccccatcttttcccactctcccctcccgccttcgggggataagctgaagcctcagagctgttgccatttctctgggaagaggcactttgggaattggtccaagtgtgtggatctcacccttgtccacctaattcagagggctgcaaatgggaccccgacatctgctcggtctaagttaaaggttggaggatttctggctaaaaagttagaagccccaagtccaagtccttattgagagcaacccgccagagctctctgaggctcagtttttccaccatgaaaacactgatgacgtcccctgcttcacattgcaatggagatttgcggactaaagtgaaaggggccctcagtagtcctaagggagaaaagaggagaagccaaatcagtgagacaccaggtaggaccagggaacccatggagtcagaggtggtcagacaatgtgattccctctgccatggggagagaggagttgggaagttagcacccttagatcctgtaggtgccgtacggctatcactaaccagggaacccctgcccagggttgggtgttaaacaaagcagcacaatagtttttccatgtgtccagccctggacagattaaggtgctatctagacttgaaagatgagtgtgtgagaattactcaatcctttcatgttttagaatgtagctatatgaattgtcgcaaagtatcaaaaagctgattaaaatataatatcttcttgaccactgtggatgctaatgccctcgatcccccataatggaagctttcagtcgatgaacttatggaaaatgtgctcagttatgtttattaaagtgaaacgttggttacagggaaggaaactccattcctacacgtgtacagtagagttgaggtcctagtgtcaatttggaaaatcctggatctgaagagtaaactttcttctttgcaggattcaaaatggctgaatttattctctcagtgatgaaacatcacaggctccatagtaaaaaatcttggcttgcatctttccaagtattataaggaatgaagaacaaatcttcattggttggttcttagtttgttctatgaccaggctttagtaaaagtaatcagagcgttctgtgacctggatggcttccgttgcattatttcctcttatgaaaatctcgaaattctgcaaggatgtatgttattatcaccccacttcactcgtgaaaggacagatgcttgcagatagtaagcaactccatgggactaggatgaagcagcttgggcccagccctcaagttgtctacccccagtccagggctctgtctgccttctttcactgtctttccagctggcaaaatttccttggaagtaaccctacatttcctgaggcctggtggtctgtactgcactcctaattcctctggtggagagggtgggagaaagacactcaagactttaggtctagtgacctaaccttgtacgaatgagtccagccagctttctagaagcagtgaaggcctaggtgttggggacgtggagtctcagctcagggtggtgccaacggacggctctaacatttctgtggtgagtctgtcagtgtgaatcagagaatattctatgggccgggaccagagcctgccctaaccatctcccaggcctcatgtgctgctgcccctctgtgggaacccagggaactgttcacatttgatttgaacttggggctaaagataagaggataaggaaagcagacccaactcaaaagacaggggggaaaagctttctctatcatcgtttcgggacatttccacatcttaaatttttttttgctaggtcttcatattttacatattttgtgtcttaaaatggcagtgacttttggtatataagcagccttagaaaattagtgaaataagttttttaatgtccctcatttttactgacctcaattttatctatggccttaaatttgcgaaaagattgactgctctattttggtcttcctttctcccttcctacctcaccgttggtcctcaaaaccaattcactttttgagctttgatcactagcttgtaagactgttcagggtttaggaaacagcgaggaaatgagcatgacaggcaaggagccagccagggggtttgtgtgagagggagacaggcactgggacatcattcatttacctaatcaatggaaatgcaatggaggtctattttctcatgtgcagaccctgtctagcagactaggaaaaatagtgtgaattctctgtcttggactgttactccttaaaatcaaactaatgtctgaaatgtaaatctatgaagtacattaccttttgggtagaaagtttttgtttagttcacaagataacaaagaagctctggttttgctgacaaactagttctgtggcctctgacatctccctgaacaaagctagcttctctcattgtctccaggaaatctttctacctcaaaaattctataatacctatgcatctatgaatacagaaagggaatgaaactctttaaggaaagataagtattaaaacaatttattttggccaggcgcggtggcttacgcctgtaatcccagcactttgggaggctgaggctggcaaatcatttgaagtcaggagtctgagttcagcctgccaacatggtgaaaccccatttctactagaaatataaaaattagccaggcatggtggtgggtgcttgtaatctcagctactggggagtctaaggcaggagaatcgcttgaacccagaaggtggaggttgtaatgagccaagattgcaccactgcactccaacctggatgacagagctagactctgtctcaaaaaaaaaaaaaaaagctattttcttctatctcagcttatctctaaagattcattattttgtcaaatgacttcactacaggaaacttacctatagagtgagcttacctttcttagggaaaactgggatttccatgaggagcaagacattcaggtatgaaagagtcagtgctttctttgaacagtaatacaaattcccaccacagaattttggaccggtattgcaagccgtctgtcctgtaatggttctagttaaataaagtcccctattacgagttgaacattgactccctggtctacttaacccccaggaagcagtcacttacctcattaaaggtaaacatttcgttattcaagcctgtttgacttctggtctgtcataagtttaaaagttgtttttctcataaaatagtattctagataattctgtctttatattaattctacttggtgagtcatttagaattttataaaagaaactagaacaaagaaagagcatgcacaaatgctcacatagtaattttaacagatatatagattaaatgtgcagtgaaacatccattttaaaagaatgtggtatttaggagtcagtattgatgggattgaaaagcttatctttagttcattttacgctacgttggttttgacacagatgtcttgatttattacttgaataaataaagcctgagatagcagaatgggtttcaatcctttctcatcttgtgatttgccttagtgttcccatgacaacgttctcttgctctttttctctccttaccccatcctcaacattcacacacaggagtcctgtggatcattgtataggtgcaatcctcctggaagtttagcatctggatccacctataggaagcagagggccaagagtgcaaggacacctttacagctgtgtcccttgcaacatgttgaaaagcaattggattgggagctgggacacaggggctcaatgcaactccaataggtcttgtttttcatctctcctctgctatcttctgcttgcccattcttcagtcttctctgatccctctttctctttctgcccatctgcttgctcatctccctactccacagggaggaatttgaccagcaccactcccaggtttacatctctttctttagaagacaatccaggctaacactgaattctcttaggcctgcatccctgggaggagactttttgctctgatgtgggctggtacccactaagtctactatggtgggcacagaggtaggtgcggctcacattgtgctaacaggggtgctgagatcctgaagatggttacaccatggaggtctgggaaagggacaactcataaaggttgatggggagcagagagcagaggagaaaatacagacagccaacccagtcaatgcccagaaacacttgcagggagttgtcagctgagagtggaaagtgattgctttgtttaagtattctatctgagctctctccaatttaacattttgagattaaattatacattactgtataattaatatagaatctataaatgtactataaaattatacatgttatagactttggggagatttttaaaaacagcatcctttgactttgtaatatattagaatcaaatcattacctgatgtgatttataaatagatttgcttccacaatctgctacaggttatgatacggtaaaaattttatctttgaaagacttttgttttcctggcttggctcggtgactcatgcctgtaatcccagcgctttgggaggccgaggaaggaatctcagttgagcctgggagttcgaggctgcagcgagttgtgactgtgccactctactccagcctgggcaacggagcaagactgtgtctcaaaaagaacaaatttttttttccttgtagatttatagactataggatacaatgagacttacaaagacttagtgaaagcaggttgtatggtaatcaaatgactatcatggattccgcatgtggtctcttcaactttacattagttctctgggactcctgacccagtattccagaagtcagaacaccaaaaaggtggagattagccacatgccctgaattgggttatactgaaccttgaactgtaccttatgacttagcatgtctattaaataagcataaataagcaaatctatttataaatcacatcacgcaatgatttgatcctaatatattacaaagttcaaggatgttgtttttaaaaatctcccaaaagctataaaatgtatattagcttccctaaagtttgagagagctctgataaaacatttatacaaagcaatcggtttacactcttagctgacaactctctgcaagtgtttctaggcaaacgaaaaaggtgggcaaatgacagaatgacggctacatggagttgacgttgtcagataatggcagggctgcattttttttttaaggacgtccaccttccttccttctaaagtcatcagcagctatgactgttttttggctgcccttcatgttgtgcatatttcctgtgattatatttagtccattttaactttttagaatttaactttaaattttcaggatgtgtgattttgcattaacctttcaataaccaggtccagcagattatgaggtaaaaagctccagggaattattcaagcacttacaatgttatatcattggaaaatctcattttatctgcaaggagcttggctgctcttcattgagttctcactgattgtatgatgcagtatcaatgaaaatattaaaccatttatctcaggtcagagatatctcagagaagtctcaggagactttgttaacatagactcaatcttccccataaagcatttccaatatcctataacaacagcacaaataataaataaaaacaatggtgaaaggtagacggtaataaacaatcaagactaggaaaatatataaataaaagtcaaggtcaaggaaggatgaggttgagattagaaaagcaacccaaaagtccatcccataaaggcctcctacaaagctggtatgtttgacattcagacttaacaccgtgcttcctacctgcccaaggtcaaagagtcgcaccagtagctgtatagctctaattgtgagaagggtgaggagagaaggaagggagggaggaagggagggaggaagcatgcgggttcttttaacatgtcccacagaaattctctttaaaaaacaaattttgcttgacctttaaagtaacaatttaaaaacaacattttggataaaaacttttctaatgagcatttcatattcactgtgtttctgtttctttaaacatcatacacataacataatttaatctgataatataagtaatcactctaatcttgctgctggtacccaagtattgcttgctggtacccttaggtctttcagactatttgcccttatatttaataaaattttatatttgcatctctcccactagtactctgctctctgagctcttttttatttttagtagtttttcggtttcctctgttctggcctatctcctctcactattattcctatgcctacctctaacatccttttctaaatccactacaggccaggaaactagaaaacaaatttgtttctattgcaaggcaagtagatccagctctactctgtgctttaaacaacctataaaataaatattttcaactgaaataaatcattcctacttttcatgccatttgagaaagctcatggaaaaattcttacttttctcatcctcaatctttatttgtaagtgaaatttttcttagcatactctgcaaactgcccttccaccgtatttttattgagagcatcctccataacaacctatctttttatactgtttcgtgagccacttctggctggcgcctgcctttttttcatttattaggttgccttgtgttcgtagcctgtgaagctctttggagaaaaagtattacataaatccaattagaagctatatattcaaagtgagtgcaggaattacattgttgattacgtgtaagttaccatattcattattaaattaacttattaaatgtttctctgggtcctttataatccatacaacagaagattctttttctgctttctataagcctttagggcagataaacatacatgcaaagaggcattttgaaacatacggcatgaaacactggcagtatatttacaaaggtttaatactttagtcactgcaagcctacaatggggtaattactgtccaagttactatctgcacatcgtaatttaaggaaaaaagtgaccatttttattccattgagtcagaagagagcctcagtagagatgcacttcaggggccatcagggtgaaagaggaaaaagcttggtgaattgaaagaatgtaaagaggatttgagttttggacttctcctgagttcatgtgtgaatttcataattcattaggaaagaatatagcaacaatgtaatcatacatacatgcagtgaattggtctgaaacctgaaaattaagataaaggtttataggctgggtgcagtgcttcatgcctgtaatccgaacaatttgggaggccaaggtgggaggatcacttgaggccaggagtttgaaccagcctggccaactgagtaagagactatctctacaaggaaaataaatctactttaaaaattcgtaattaatggtcaggcatggtggttcatgcttgtaatcccagcactttgggaggccgaggtgggcggatcacttgaagtccggagttcgaggccagcctggccaacatggtgaaatcctgtctctactgaaaatacaaaaatattagccgggcatggtgtactgtgcctgtaatcccaactacttgggaggccgaggcaggaaagttgcttgaacctgggaggcagagtttgtagtgagctgagactgcaccactgtactccagtctgggaaaaagggcaagactccatctcaaaaaaaaaaatagtaattaattttcaaaagtatttctgagttaggccgggcacggtggctcactcctgtaatcccagcacgttgggaggccgaggcaggcggatcacaaggtcaggagatcgagaccatcctggctaacacggtgaaaccccgtctccactaaaaatacaaaaaattagcccggtgtggtggtgggcgcttgtagtcccagctactcgggaggctgaggcaggagaatggcgtgaacccgggaggcggagcttgcggtgagctgcgatcgcgtcactgcactccagcctgggccacagagcgagactccatctcaaaaaaaaaaaaaaaaaaaaaaaaaaatatatatatatatatatatgtatatatctgagttgtaaaattataccttttattcaaagtcataaaaataaactaaaaatagtagactacatgtttggaaaacaatacaatgtcatgaaatgaagtacatatttcagcataaaaaatatgcatcatttaagacaacactggagaatttgaaatccggattagaaaatctggacctagattgtgtgtctgtacatcacagagttgtggcaccccccggacccgggagatttcccctcatcctggaagatttcccttcccaggtgccaggcagtgatggcaactgaataaggccaccctgcaagacgttgctaagagacagcagaaacaccgcaatgggttctgtaaactcgatccaagccagtgatttgaagctgtttgctggtcagaccgtactgggagttggggagctgaggttgctttggggatactgctttggatgaggatcccagcgcaagactgcaatcttgaggcagcacataaacaattctgggctgcggggcgcggtggctcgggcctgtaatctcggcactttgggagggcgaggtgggcggatcacgaggtcaggagatcgagaccatcctggctaacacggtgaaacctcgtctctactaaaaatacaaaaaattagccaggcgtggtggcaggcgcctgtagtcccagctactcgggaagctgaggcggcagaatggcgtgaacccgggaggcggagcttgcagtgagccgagatcctaccactgcactccagcctgggcgacagagcgagattctgtctcaaaaaaaaaagaaaaagaaaaaaacacaattctgatgtttgaatagcaaatcagagcaggtgattcagttgagaataagcaggctgtgacccctgaactaaaatgccatttagaaatttgtgacccctcttataatatgtcagttcacaacagtcctgtacagattggcttttctgcctttttccctctcagacaagacaattattaagacctcttaggcctatctttttttttttttttttttttttttttttttttgagagacagtttcactctgtcgcccaggctggagtgcagtgtcgtgatctcggctcactgcaacctccacctcctgagttcaagcgattcttgttcctcagcctcccaagtagctgggattacatgggtgtgccaccatgctgggctcatttttgtattattggtagagatgggctttctccattttggccaggctggtctcaaactcccaaccccaagtgatccgcccgccttggcctcccagagtactgggattacaggtgtgagccaccgtgccctgccaggcctgtcttaatcatgaagcctgaccaaagaatttgtagcattaattccccacctcatcccttttcaggtttgcttggcctttgctgcaggtggaacagtctgtgccttatgggaaaaaaaatgggttatcattctgttaagaggcaagaaaaagaacaaaataagttattcatgaattacaagtatagcaggtataaaaatcaacattctcagataattaaccattttattatctttaataaaatctagccccaaatcctcgtactactggaccagcaagaaattcagtctcggatagtctcagggttccccatcctttatagttgggccaagggtcaggaaatttcaacggtacaaaagtattcatgcattttcacgttcacttgagtccttccacatgaactcagcacagtacagacttcagagccagatggaaaataaggattatgtgagttataatatgtaaagaacttggaattgagcctagcacagaatatgcagaccctggagagcctccctgctttgattgccagtcctccatccacccgaattttggctcaacagcctctcaccctaggctgcatgctttcaggtccaacagttccactgcttctgtgtcctggttgcatttgagcagctgggagcccgtggcctgggttttctctcttttctccatgtctgaatagaaatgatttttcttacccacctctctcatcttgaaatagaaagacgaaatgtattattttcatctaatcataattctgtgttctgtatacctaatgtcttaattctccataaattcatcatccactgcagttcagaacaagtgagactttgaaaacaagagtattattgaggcttagaaatgttcagaaaaccatccgggctccgtggctcagtcctataatcccagcactttgggaggccgaggtgggcggatcacgtgagctcaggagttcgagaccagcctgacaaacatggtgaaatcactagaaagttagctgggcgtggtggcgggcacctgtaacccaagctactggggaggctgagggaggagaattgcttgaacccaggaggtggaggctgcagtgagcagagatcgtgccactgcactctagcctgggcgacagagggagactccgtcacaaaaaaaaaaaaaagaagaaatattcaggaaaccaaaagagctctgtagagttggaagagtgaagttatgtgcatcagggtcctctaacaaggttaaaaagtagaaggcagaccaggcatggtggcttacgcctggaatcccagcactttgggaggccgaggcgagtggattgcctgaggtcaggagttccagaccagcctgaccaacatagtgaaatcccatctctactaaaaatacaaaaattagccgggtgtggtggcaggtgcctgtaatcccagatactcgggagggtgaggcaggagaatctcttgaacctgggaggcggaggctgcagtgagccattgcactccagcctgggcaacaagagtgaaactccgtctcaaaaataaaaagaagaagaagaagaagtcggaggcagacacgtgaaatcctgtaaaattctgactaactctataaaagtcatctcataaatgcacccacccttcccttatttcagggtgctgcctctgggcagctccccgggttcatcagggttgtctttctccccgctttccaggctcaagccaaggccctctctcccctcaggattctcaacagccttcccgtttctcttcttctacccagaacatttctaacctcttctatgtcttctgcagaagggaagcatcttgagccataaacagggcagaagagggttaggcaggaagaaaggggagctggtaccccataaacgtatatgattattatgtacctacagtaattcattaagaaataaagaataaaaaaagattaggaggccgaggtgggaggatcactcgaggtcaggagttcaacaccagcctggccaacacggcaaaaccccatctctactaaaaaataaataaataaaaaattaaccgggcatggtggtgcacacctgtaatcccagctaatcgggaggctgaggcacgagaatcacttgaacccaggaggcggaggttgcagtgagccgagattgcaccattgctctccagcctgggcaacagtacaagactccaacccccctacccccttccaaaaaaaaaagaaagagagaggagagctgaaaaaaatgatcaggagaaaatccacaagtttgtaagttatcctgacactcaagaactctttgaagagggtttaaaaataaaaataaaacactaagccaggcctgcctagcctaactaaagaaaagagttaaagaaaatttgaattttacaaaaatggatgaatacacctagattgattatctggatacaatgtcctggattcaactttgcttggttagtgctgagttccagtgatttaaagaatcagtcaaagggctgtgggtcagcagtgtggaaagtgaggtgtacaagacaatgtactaggtactgaaagaaaatagtagtgcttctgtttatatatatatttcttattttttgagacagagtctcactttctctcccatgctacagtgcagtggcacgatctcagctcactgcaacctccgcctcccagatttaagcgattctcctgcctcagcctcccgtgtagctgggtttacagacatgtgccaccaagcctggctaatttttttgtatttttagtagagatagcgtttcaccatgttggtcaagctggtcttgaactcctgacctcaggtgatctaccaacctcggcctcccaactgtttatatttttatatcttgcctctctagctttatttttgtgggttttttttttttttttgcacatgacatactaatacaatagtgtaaatacatcagtcataaatcaatatgtatattttgaaagtgaatgctccaaatttttttgctgatggagtgcaggaaaataaaaggtttaaaccttgctaggcgtatcacattaaaaacgaatgctatctacaggacaattttctgtaagtctttatgcctctcgtagccataacaattcatctgaaatagggattgagtaccccgaactatgggcaacagtctgttttgtgacactgctaaccagaagaaacctctcctaatccagctacttgggaggctgaggcaggagaatcgcctaaactctggaggcggaggttgcagtgagctgagatcatgccactgcacgccagcctggtgacagagcaagactctgtctcaaaaaaaaaaaaaagaaaaaagaaaagctttttgagatgagagtttgtgcagaactgccagatttcgcaactaaaaatagcaatattggggagatacttaagctcacaaatgatttgttgtttatctgaaattcaccagatgtaactggtgtcctgtattttatctgacaaccttagtttagagtcagttctggttttgaagtccagctagctgagtgattcagggcaaattccttaacttctctgagcctcactttctttgtactctttagttgtagtgaacattctttttacaaaagattcgaagcccttagctacttcctgcacatcgtagaaaacgttctcactaaatcgtaggtattatcacgatgatgaccctatccctttcaacaccgtttcaagtatttgtgtacaaatcttatctcccttactagaaaggaagatccacgtttgcacagatgtacatgtaatgggtgcataatctgcaaattttgcataaattcagcttctgcccaagcacttttagggagtctagttgactgtcaacttggctggccccctcttccaattctattccttttcctttcccttcccccattggaagaatggtgttttgttctgaagttatttcaagcaagctaagcccttgtggaaactgccttactcagcttttgtaggccaggggatcccacagcccgaataagatttattgttatattagattttaaaactcccctgtgtcattctttgaaactgcagatgaaaatgaatagcatttatgagaaccattgtaaagatttaatgacatttgcattcacgctgctgaaagtaaataattaccgcactgggtggctatttttctgctgaatttagacagtttaaaacaacttgccctatgtgagcttgacgttagtttgaatagccccatcagaactgtgagttgggtgcgatggaagctgaggtattatgaagcataataaggatttgggggaggggagcccaaagacagtgacagggcatggtagaagggacttgctggactgttcacctttccaggccaccccttgaaaggaagcagatgtgggcaaaaaagagcaactccatttttcacacagtcagagccagcccaactgcagatggcctgtacatcgcagcaccaagcacatccctggtctaaagtgtcagttcttttttttttttttaattaaactttaagttctagggtacatgtgcacaacgtgcatgtttgtgacatatgtatacatgtgccatgttgctgtgctgcacccattaactcgtcattctcagcaaactatcgcaaggacgtgtcagttctttgtcctgccaccccttgctatcaaaagggaagaggaagatgagcataatggctcacgcatgtaatcccagcaccttgggaggccgagggggaaggattgcttgaggccaggacttcaagaccagcttagacaacatagtgaaaccttgtctctacaaaaaacaaacaaaattatccagacattgtggtgtacacctgcagtcccagcttgtcaggaggctggggcaggaggatctctcaagccctgaagatcgaggctacagtgagtcaggatcatgccatggcactccagcctgggcaacagagtgaaccctgtctcaaaaagaaaaaaaaaaaaagaggaggaagagtagagcgagaagaaaggccatctgaatctatttttttttaaaatcctcagccttagcttcccccatgtcaattccaccatcgctaaggatctcaaggggctgtatcctcttctcatgtgtcctggggactctggcagatatcacctctatgtaggctgcaggggagccaaaaccaagggattgtgcagccagtcctgtattcccagcacacagacctgagctgtgaactgatgagctgggttgaactttcaggcttgtggaaaatcactctcttccacatcttgatcagaaatcacttcccatgtgcctgactgatggagggattttccttcgtacccacaagggtcccacgttggaaatttaaaggcagatagctgcggtcagctgaaaagatagagtgcatgggtagatatgccaggaacattcctccaaggtggccagaaaaaggtccagagggctgggtttgataagcccagtagtcacccagttggctccagtgggaggaaatgagtcatgcagacgcaactgctgtgggtctctggagaacagctcctgcctgcttcattgacccctgctgtggctccctgcagttcataagacaacagcttccatcctgagccttgagtgacaccccttgctgctggcttgtgacaccctgggaagcctctgtgcctgaaccacccgactgtggttccaccttctggttctaccagcccacttatgttggatttcccatcctttcacaagctgttcgagttatactcagagagttatgatcccgacttttttgttcaaagaacacatggtcagagtccaagggctgttctggtgccttctgtgggaggcatcctggagaatgcaatgactcttggtgcaatgatgtctttccattttcttatccctcaaatgaagccttggatgaggtgatgcttgaatttcttcccaactctcagattctgtgagcctgagctggaatgatagatatgaacatactgtaccacgcaagagggcatggaaatttcaggtagcactactgtagttactattagttactattactatcatattttcctctgacttgtctcacaaacgaaggcacagcacaatactgatttctctcagtttacagttcccgcaaactgatcaatttttttaaatgacagtctgcccaaagaactcatcagtcttgcatctttggtaaatagctttcactcatttaataaatattcattgttatgctctgtgctagaccctgtgattataactaataataatagtcataaggcttttctttgaggtgtttataatctgactgaaaagacagtcattgaataaataataaaaaaatgatgagtgtccccaagaatgtcaagatgctatggaaatgaataattggggcacccagcctggttttcatggttaggaaaagcttccggccagaagtgacttccaggctaatagtataagctaacatttattgagcatttattatgggtgggtgggcatgttgtgtgcattatttcagttaatgtttgaaagaacaacatcagatagattctattattgtttctagtttatagacaaaagaaatcaaggcatacgaagtaaaaacatccccaaggctcacaactagttggagataacctctgaatatgagtacaggtagctgcacaccaggttctgtattgactgtggagtagaagagaagttggatgagtctggagataaagactgagtcagactctgcagtacctgatgtactgtgcaaaaagcaccctggaagaaagtgtcaactggttgtgtaaacttgggagggcatttattggttgaccctctgctccctaagatagtagtgtgttggtgaaagaaaaaacaagctactttctaattcaaaaaagagggagacaaaatggcctatatccagccagaggtataagggtttgttagaattaaaatttctttaaagaaaaattttctcagaactgagatggattgtgtaatcaaattttctaataagccttaagttataaaactctgtaatgattttaatgacgttctaactagtatctaccagttggtagtacctaccagttgggaactgcttttaaaaattcaacaaatttagtttaaagatccagttggcttttattagcaattcatgaattgggcagcatcccatctaaggatttagaaaggtgctgccatgacttgaccaagggaggtgagtttttgtgttactgtgaaatatttatttggtattcaaacccatttcccagcatagaactcttaaaaaatctttagaatttccaaagtggtctttttgtatgctaacaagttgattcatggctggtagcttcagattggaggcggtcaccagaaagatcaaggcaggattagagggttgggactttcagccccaccccctagcctctggggatgggagaggggctgagggttaaagtgatcatcagtgaccagtgttttaatcaatcatgccatataatgaagccttcataaaaactcaaaaggttagggcttgagcaacttctggatagctgaacccatggaggttcctgaagagtggcatgcctgtgtaagggatgggagatccatgccccttaccacgtgccttgccctgcgcatctcttcctatgtataggttgtaataccctttgtaataaaccagcgaacgtgtttccctgaattctgtgaactgttccagcaaattaatcaaacccaaggaggggatcatgggaaccctaacttcaagctgatctgtcagaaattctggaggcccagacataaaactggtgtcttgtgacgagggtcagggggtgcagtcttgtcagactgagccctcaagctgtgggatctgacgctatctccaggtagatagtatcagaatttaattggaggacacccagctgatgtccaccgcagagctgattgtttacttggtgatggagagaaagaggagaaacttcccaccacacacacgtttggtcacagaaatcttctgtatagattattattgttatggtaagagcagaaaaaaacctaatttgtgttttttcccctcagagttttataggcagaaaaagatggaagaaagcagacacaaggaacaaaaagcagactggtcattacaaaattactttccttatagggttaaaacagaggggacttccttatgccggctcaggtaacctgcaccccttcctagtggttgctgtgaatctcctggtttttttggaaaactagcccattttaaagtttagtttaattatgtggcacttagcatgaatgactccattttggtttggtctgttctgttgggacctagtgcaggagctcagtccaaaacaatggcctcctatgaagtttatttaatacaatggaagtaaatgttcactgctttacttcaagctaaaatcacaaaggcattgattctagcaagttcttgtttttaattcctggcatttcatgtttggaccaaataattctagcaagttcttgtttttaattcctggaatttcatgtttagaccaaataatgaagcaatactagaatgctgagtgggaagaattttattcctaacgtttttaaagcataattcagaaaggttaatcttgaacattttttgctaggggggacctcatcacattcagaagattaatctgctgagcagcgtttagattatctcggtattattagaatgtttctccctttacttgaaaagaagccattggaatgtccctaacacaaagaaatgataaacgcttgaggcaacgactaccccagtgaccctcatttgatcattacacatcgtatgcttgtatcaaaatatcgcatttaccccataaataggtataactgttgtgtaaataacagttaaaaatagataattaacatagttaataattaaaaatattttttaagaaacgaatcaaaaacggagaaaaaagaagccatttaagcattctcatgtctaatattactctatttaggtacacactaaaggtgtctttaattattaggaattacatgctgttaaagcttaattaactagaactcaggtacttggagttctcgtttaattgaatttctttttgttgttgttgctttttctttttttttgagacagagtctcacttcgtcactcaggctggagagcagtagcacgatcttggctccctgcgacctctgcctcccaggttcaagtgattctccagcctcagtctccggagtagctgggattacaggtgtgcaccaccacgcctggctaattttgtatttttagtagagatacggtttcaccatgttggtcaggctggtctcgaactcctgacctcaagtgatccacccacttcggcctcccaaagtgctggaattacaggtctgagccactgtgcccggccttgaatttcttttttgtgctgtatctaaggcttcaaggaaattgccggattataagatgctaaaaataaaaaaacaactcttattttaagactaaggaatccctttctgactatgcaccttcaggccaggattctgtgtcctccagttctgacgcactaccacacttctagggaagaaggacatgaacttggaaaccaggtggacctgggtaaaagtctttactatactcgctattgatctccagacatgctattaatatttaatttcttgatagctacattcattcatctgcccaacagggatggtaatacctgtctcaccacgatgtagtgagaatcagatcgcggggttgtgtaaggaaaacagagggccagtccgtgataggcgctaaggaaatcgaaagcatttaaaaatctagatttagcctgagccaccacaattatcacaaatatccaaagaactgtggcattacatttgctattctgtactacctctggcagaaaattattccttcatattttcaaaagatgattttaacaatgacagttaaaattgaaatattttggttagctaataaattggttaactcttggtaagctacttttaaaatcagctaaccagtgtgcccaatttagaaaatacccaggttaataaaagattgattgtcctgtattcagaaactacagtgttttctctacagagaacaggtgcgtcttacagactcaatggaactctcaactctgattttagcaaatttgaaataacagttagaaactagtgctgtttttctctacctttctacactaattaaatctgtattcttcaagtccaactgtctcacacatgacttctaattaatttcttctttttttaattaacaaatacctatcggcaccttcacttttggatagacattttttcttgactagtttttaatggccctgagttttcttttcttttgcatttgaggtaaaactgatcaagtcagctagatatgatttctgcaaaaagattgatatttcatacgtgagtgatcacatgtctgtagtaacatcttacatgaaatgcatgctaatctacctgattttggtcaatatggattttgatgtaatgtagcgtttcccaaaaatgtggactttaagtgataacacaacttctattatttttattttagaagttatgcatctactttaaagcatattagtatgtgtcttttacttatagaaaataatactggttttccctttattaataataaatctaaagattcttttttaaatgatttaagtagaaaaagcattaggaattgaatggttgttattcatatatgacaaaaattgtgtagatggtctgtcgtggagttaactggggaaacagtggtctcttgctgttcttaactgcatgacttgaacaagtctctactcttctgagtttcagtttcctcatctgcaaaatggggtttggacttgatgatcaccccatcaactgtaagcattctaaggtaacagacagcattttattcatctttctatcccaactgcaaaacacactgagaggaacaccagtctgcctcaatgtttgactgccaggattccataaattaactgagaccccgccgcttctgctattcaaacatccctctaattctatgtccttagttagcatttttgttcagttgcttattggtaggaatacattgtgtagccatcagcttgaatatttaaaccattgattgagtttacttgtgttctggatgaactaggtgccataaaggaagtaagagaagtctagaaagtgaagaatggcctcaaagagttcacagtttcattgggaaggcgcttggaggacaaagtagccagacagataatcagtacaattgggtgtaataaattttacccagatggggagggaaagttgttgggaagtttatgtagaatataggacatgaccttgaaggaagatgagctaaaataaggataagaagaagaaggagaacattctaagctgggttcatcatgtgtgtaaagtctgggaagtgattttttttttttttttagacggagtctcactctgtcgcccaggctggagtagagtggcacaatcttggctcattgcaacctccgcctcctggggtcaagcgattctcctgcctcagacttctgagtagctgggattacaggcacaccccaccacacctggctaatttttgtatttttagagagacagggtttcaccacattggtcagagtggtcttgaactcctgacctcttgatccgcccaccttggcctcccaaagtgctgggattacaggcgtgagcctccgcacctggccgggaagtgatttttttttttaaatgcatgatttaacaagttcaccagcaaacaaacaagatagtaatacctgtccgctcctgattcaagcacagtatttgcaatcgacatacttgtgggttgagtcattttgttaataatagcgtgttttgttttgtcttgtcgccagtgattaaatttttcactatatccttttttaatttcccaaaatatttttatttttattctctaattataaggatcttgaccaactgaatgacttcatcttttttgtttgtttgttttctcaatgtggtgtggctgtgtgtgcatgtgcatgagtgtttgtgcttattttcaaggagtcaactacgattttatatatttctttttaaactgtctgtgtagttataggaaaatgggaaggggtgaggataaatgaggcacaagcagatgctgctggtggaggctggcacctggctgatgcccatggagcatgccaaggctgtgaaggaaaccctggctaatgaatgtgccccactgtgttttgtggctggctgaaagaagtcaaagggccagtcagagaaggtaggagccaggagccttcaacaagggggctgttgttaccctgccaaagaagatgcctagataaccagggatgggcaccgtcaaagccacttgccagttttaaagctcgtgcccttgcatgactggttgcttccatgtctcatctttcagttccttctttcccccttcagctaactttataattgagggaatcataaagaagaattccatcctgtcagtggaaaacaggtataacagtggaagaattattgattagactttggcatggaggcatatttcacactgccaagatctattgacatttgttgctgttgttgttgttgtttgagatggggtctcactctgttgcccaggctggagtgcagtggtgcaatcatggctcactgtagccttgaactcctgggctcaagcaatcctcctgtctcagcctcctgagtagctgggactacaggtgtgtgccatcacatctggctagctttttgttttttgaagagttgggatcttgctatgttgcccagactgagacattaatatgttagagtggagctatatataagatctatagacctctgtggttacagatataaggaaatcagtaaacctaaaagtaaactgtagatacctatatattggtaaataggaggtattgatagcaaaatctcttcacaaatattcctaaaactgtttcttggaaactcatttcatttttaaagttttttttctctttttcaattttcctctagtcacctgaatccacataatccttaaattccaaaacttaaaaatgtattcatttccttcagctgatgttattcacaggtgaggaagaagagaaactgcatctcagcaaaaacctggattttcagagttagggcccttcctacataatacgacataaaagctgtcatttgaaaggtcagtgacatttaagggtggacttttgtcaaaagcacttatttcaagcccagatttgacagcagcccgtgcaggcttgctcatccattgatttccaagtcctgccccattgctggggatgcagctctctgcacagagcaaagccagaagttccagtggttatagaagacagagcctggtaggtgccctggagaggaggctgggcagatagagctgaagggcaccctggcaggttgggaaaaaagcaaatgatccaagagaaaggccatgaactttctgtgaattgtttatttcctgtctcctttatctttacaatttattttctaacctttcttctttttcttgtgggaatgattaaaggtctcaactcagtgctttacagacgtagaaattttttaaatttcttgactaactgatagcaaacttttgttctcataatctccctgtctaggcacaggggtaggagaaggagggatctgatgttacccaataaagtactttggtcccacctgatactggcttaaatcttagacttttctaaaagtttagattgctggggctagtttcttgttctgcaccagctgctactggtgctgctggaaatagtgtgtttcagagcttggtgtaccctgctttccttgtgcttctcatgagctctcctttttttcctttgagttccatcatccgcagaagtagcaacagagatggaggctagagggacatcttcctacgcaggtaaagggggtctaaggaattgagaagcttgggtgtggtccctcctctgctggcccctgttgtggcaccatttcctggtttgattcctggcactgtgaagcagactcacccacaactgggtgttatttggatgagagactttccgatgacttagattctggtgattctgcttttcatgtctctgctaaagtggagatttctgtgtggatggcataaggaatttccatgggcagcgttcagcctcaatacagctaaccagcccaaaagatcactgggggacagtcaatctttcctgtggctcttgccagccatatatgctatatctcttcaggttgggtagctctgctttgaagagtgaacgcgagggccagctatgggtgcccatccttcaattaacctcacctgggtcacagaaaccagctgaatatttgccttgatttccaaagccatggagaacaatgacaacatcctcacttcctctttccaaggtgctccacgtgatggctccctctcaccctacaggcctcggtactgatgagccactaaccatcaaaaatagctagataaggagctggcactgttctctaatttccagaaacatctccaaacttcaagaaacttttgtacaatgtgcttaatcacccaatttagggaaaaggaagagatacaggtagaatttaagttgggcctagctggtagggtagacaacacttttttaaaaaaattatcatacagtaaaattgacttgtgtctgtgtgtgtgtatgtacagttctatgaattttaacacacatataatataaatgtatataaattatatataaattttatatacttatattgtatatgctattatatattatatattacaatgtaatatatcatataattttacattatagattatattataaatatatttatataaatttgtacaactatcaccaaaatcaggaaacagaactgttatatcacccaaaacaactcattaatgctatccctttatacttatactttctccccacccataatccctggaaaccattgatctgttcctcatcgctgtagtttagtgctttcaagaatatcaaaacaaacgaaaccacaaagtacgtaacccactgagacttgtttctttcactcagcaaatctcaatgattttgagattcaaccaagttatttcatgtatcaacagtttgttcctttctgctactgaatattccacttacaggtgacccttagtttgtttactcattcatcctttgaaagacatgttagttgttttcaagttttggtgattatgaatagaggggctgtaagtggtcctgtagaggtttttgtgtgaatagaagttctcagttctctagggaaaataggagtgggatagctgggtcatatgatgagcgtatgtttaacttttataaaaagctgccaaactgttttctagagtggccctgtcattttgcacgcccaccagcaatgtatgcgagagctagtttctccacatccttgccagtatttgatattttctttttcttttttgccattctaataaatgtgtagtggtatctcatcatggttttggaatttatttcactaataggtgtccttataacctatttggggtcttggaggccctcttctttgggggcataactctttagttgctagatgaagcaaatgtttagcagggtcccagagaaggggccaagataggaggagaggtggggtaaggtggctaaggatggtaactatttacaaccagtatgaaatatttcaatatttaacaactggtatagccaaactagtagagatcattgaatgtaagtcctggatcttgcaaagaacacagaaggcgtgaccagagtggtgggcagaggttttcgtgtcatagaaaactgaagggttaattgtgtttcatgctgctgagatgaggccatgtggagaccttgacaagaggtcaagagaaacttccatggaaagatgggggtgaaaccaaattctagtaggctgaagagcagtatgtgtataccactcttggagtgaacgagagtggttatgaacaagagtagagaaatttcttgttcaaatttgattatgaacaagagtagagaaatgaggcagcgggtggaagaatgcataaagagatagtcaaacatgttcatatgccagtgagagcagtacagggagtatgtgctgttgatgcaggattgaggggttaaccaaggggaaccagttttaagaaggaaagagatgaagtagcatcaagagctcatcaaaagctagctagaggcaaaccggcgtataggtttggtgatagcaagatgaaagttcatacccttatcagacagcttctattttcttaataaaagtgtaagctgagctcatcacccacagcttgggagattagagggaatttttagagcagaacaagcttctacctaacctcttgtgaattcttacacagtgaatccctttattgtattctttttatctctatttctttttacttttgtctttgttcacttattttgaattcctgccactaaggaaggggtcagcaagggatatttggatatatttgcaccagacatgtaatcagggttcacttagcttcccaatgtggaacctagaaaaccagcgacagagtttggaatagttgatgaaggagccaaactgataatggaaaatgtgcacagacataatatgtagtttggagccttaatggaatgtttgctgcctgttgaaatttggaaatgatagcaactgctttgctaatatgatttcaacttagacatatcttcatttgcccatgcatttttcatgctaattagattgtgtacatggaatttgtccatgctttccatcaggagccttcttttttctttataattgtacaacgtgtcaaaactctgacttctcttctactgaaaggaacagttccaagaaatttttttaaattaaatccacatattcagacccagtttctgactggctcgatcaattatgttataggagggtcagttttatttgcaaagctgcaaccattaactgcctggaggccatgacaggtttcttttgtggactattttttaagttatagattctacattgaaataatatattttgtctgcctgtatttgaaaacgatcaaagaaaaggaagttatcccacgaagacgttactgcaagtgatcgcatttcaatgagattaaaagtcaaagaatagcaacaaggggcagagtatttaacactaaggagaagaaaagaagtcagactgacataaagatttttcaagataatagagttatgttacagcagaatgtgtctttaaggaggtgtgtagcagcatttttaataagagaacagataacctgggaaagtagtgtgttctcctgacatatgcatcagcaaggctgagtgttgaattgcattgatttctgtgtctacctttggtgaacagctttccaatcaagtttaatgtaatctgaatacaggaaaaggaatcactgccaagatgaaatctctgtcgccacaggtcacagcaggaggtgtgaattcagtgaggtttgacatttcagtgcacttgtcttaattgtgtaactttgctttgtcaacagtctgtatcatgaacaccaactatacttaccctttctaaaccttttgcctattcttggtatcttgaccttaaaaaccatagcttagtcctttctcccaaggattaatgatgcagaccagtgaaaaaaaagtctacaaatcggccgggcacggtggctcacgcctgtaatcccagcactttgggaggccgaggcgggtgaatcacctgaggtcaggagttcgagaccagcctggctaacctggtgaaatgccatctctactaaaaatacacaattagctgagcgtcgtggcgggcgcctgtaaccccagctacgtgggaggctgaggcaggacaatcacttgaacctgggaggtggagactgcagtgagccgagactctgccattgcactccagcctgggcaaaaagagcaaaactctgtccaaaaaaaaagagtctataaatcatctaggacgtaaacatgtcattagttttgtatgaactgcctcttgggtaaccatcctaaattaagctaggcaagactattctatggcaacatagcaacatctggctctcagtggattaatgcaacaaaggcttatttcttgctcatgcaactcaagtaaagagaagagagatcaagtagaggaatcagagcttttcactgccttggcccagaagtgacaaatgcatctcacattgtctaggagaagtcacagtgctttgtctacctgtacaggggtgaacaggtagtcttccctgtgcccaggtgagcactagaagtttctatcacaaattttctttctgctggtaataaataataacatatatgtctatagtgtataatgtatatgatattctaattttctaattgacttagtttaaaggttctccaagcctagaatttcaggtctatcaggatttaatattgtttgtgctatcagatgttatcaagcgataaatttgttattatgattctgttttgagaatagtttctttaatctcagttttacaaaatagttttacctcacaggtattattaatatgaagtttaccaaaaatatgaattccttggaataaatctggcagatatccaaaggtagattctttactgcattttcagcatataaaaaattacggcagatgtggggaagaaaatggagatggtaaaaataagtaaataagttgaatccatgacaagatgattatagagctctgggaatatcattttctccttcccttcctcctttcctttcttttttctttccctcaacaaacattattcagtctctgacatatgctacaagttcttccaggcaccaaaaagatgatcataaaccaggtagccattgtccctgcattagtttgggtaacacgggatactctcacagataaactcctgaatctcaagggcttaacagaatggcagtttcctttaaattcctgtacagtccaaaatgtgtgtttctgagctgtgggaggatgttttcaatcagcaattcaggggctagcctccctcacttacatgactccatcaattcaacatgtagcttccaaagcactggatggcaacaagcccgcggcaggagaaaggccctagaggatcccatgaaggggagtttcagggacctggtctagcagtgctgtacatcaggcccaagtaccagtacaacttacagtcagaggagaagacacttaaaggacaggaagaagtaagctcaaggagtcctcttttggcttaactaaccactaaggtgaaagccaaccaagtaagcagtcttgtaactccaagactgcaaccttccttaggtgaacaaaaatcaaaatttcattcattcatttgtacaaataattattgagtgccttctcttccgggcacttttctaggtatacagaatactgcagtgaacaaaacagaaaaaaatccttccctcacagatctagtgataaagtttaagataccattagcatgtcacttttttttttttcttgagacgaagtctcactgcaattctcctgcctcagcctcctgagtagctgggactacaggcgcccaccaccacccacctagctaatttttgtatttttagtagagacggggtttcctcatgttggtctcgaactcctggcctcaagtgatccggctgccttggcctccaaaagtgctgggattacaggtgtgagccaccacacccggcctgtgttccctcttgattaggcttcagatgtttttccaagttcatcttaagtctctttgtttccttacttcatctcctcatttgataagaaatgaagctttctctaaatcactctgtcccagcattctctcctgtgagatttcattttattctttttctctttcaagaagagaggagtgggtgtgtgcagcagggggcaggggacgcagtgcggagggatgattctgtcctcagcacttgttccagagccaccacacatccccatttgttcccaccacctgcctttaagacgttactccagtcatcccctgtgcgccatagacccactttcaccttcctaagatgactttaacacttgggatttctgtctgattgaatttatagtgaaccactgtggtgaaagcctgcccagtaagtcaccttgtcactccaagactacaacctcctagccactcaccctcctagggaatttccctaaatttacctgtgtggccaaagccctggctccaggctgctcatctcctgcctgaccttccacagtgtgaaggctcgaggtggggaatttgtcattgtcagtaggaagtgacacaagcaggccctctacaagtaagcctgggcagcttggctggacttcctctacctactcacattcaaagctgcacccaagcacctgtccctccccagtgtgcctgattttcaagtcttgggggcacccaatggacccacccacccacagcttagggggctcaagtcctgaccttcagccgtcaccaagattggcagcaactagactccttccccctttgtgtagacaatctgacccattctgatattaccgaactcctttcccaacttggacttccgaattagctgaattaacaatgaagcctccaccccattcctcaagatctgagtttaggtaataaagcacagctagagaaactacaagaaacagtttccagactaaaccaattctcagctcttgacactttgctttgctcattttctgtatttcttttctttttctttttctttttttttttttttgagacagagtctcgctctgtcaccaggctggagtgcagtggtgcgatctcggctcactgcaacctctgcctcctgggttcaagtgattctcctgcctcagcctcctgagtagctgggactacaggcgcatgtcaccacacctggctaatgtttgtatttttagtagagatgaggtttcactgtgttagtcagaatgatctcaatctcctgaccttgggatccgcccaccccggcctcccaaagtgctgggattacaggcgtgagccaccgtgcccggccacttttctgtatttctttaatgaactttctgactttctcaccacagtggcttttctggaccatccttgctctcttccagcctccacctttgcttccatccaatcttgctcctccctgcagaccttgccatggaaagcctgaaattgggcaaattgtggaccctggcacaaatgcccccttcctcattctccatcactttgatctaattttatttctacatctgtcctctctttttcttgtagtatcagtggaagatattttcctattccttcctggagttaattaatctacctgtgctctgaatttcttcacgcctgagctaagagatcttactcctgtagactgtaatttttcattagttctttgtgtttttctccctgaaacagatgtgtgagctcttgtactatgctaggtacggtggatacaatgatgaaccaaatgtaacccctgccagcagtctagtaggggaagatggtaacatgctaatcccccaactttgttataaatcagcatgacacaatgacaaatcgttctgcaggtagttactggaaggagcaattattctgattggggatttttatttcctctgctgcctcagagccaatttccacactccaggagcagaaagaatagaaaggaagaaaattcatgcaaacacactcattaaaacattcacccattcagaaaatatttattgagtgcctagtatgtgccagcactatgtggggtgatggagacaccctaagaaactgcattcatggagtttatagataactaaagatgacaagttttgataacacgaataagtataagctaaaaaggggcaacactgagtcatatgagagtatgtaacagagagtgtagtctgatcccagaaagcaggaaagccttcttaggacctggataatggaactgaaactgagaactgaaggacgagcgctggttatcgaggcaaagatgggaaggaatgagcatcccccgattgggaccagagggaggagggtctcttggaccagcttaagaagctgtgtgtttattctaagagccatggagatgctgaaggtctttatgcagaggtgagacatgatcagatgtgcaccctagctgcagtgtggagaggtttggatagactctgaggatgttggaagagcactagaattggaatctggagtcatatgtcttaacatcaaatcctatgagcctacagatcttaagcaaactctctttcctttctgaggctctgtttctgcctcaggacaccatgacagttgggagagaatgtgagtgactagctcctggctcacgggaggttttcagcccacttgtttaattccttatctttttctgtatttttttttatactttaagatttagggtacatatgcacaatgtgcaggttagttacatatgtatacatgtgccatgctggtgtgctgcacccattaactcgtcaattagcattaggtatatctcctaatgctatccctcccccttcccaccaccccacaacagtccccagagtgtgatgttccccttcctgtgtccatgtgttctcattgttcacttcccacctatgagtgagaatatgcggtgtttggttttttgttcttgcgatagtttactgagaatgatgatttccaatttcatccatgtccctacaaaggatgtgaactcatcattttttatggctgcatagtattccatggtgtatatgtgccacattttcttaatccagtctatcattgttgggcatttgggttggttccaagtctttgttattgtgaatagtgctgcaataaacatacgtgtgcatgtgtctttatagcagcatgatttttctgtattttctaagcctcttagccattatatccttgacaggcggggatatgggcatgggcgtagattgtgaagcccactgcatttttgtggctagttctttttctgctcagaaaggacattctggcacacttccaaggcccagaaatgacagagtcattttaattagaacactttcttttttctaatttgcaaattgcagtcctcaaagactaacttagcagagctgacatggcctccttgacctacattataagtaatgagctcttgatctaagaattaatgcagtctccatcacgagttgattggcatgtttgaacaaaagtgttatgttttcaaagccctggcttatttgagactttcaactttctgttgaaaagtggttggaactaggaattttaattgctccattccttcccttgtcatgattggtttttattaatgggtttgtcagttaacaggttacactgtaagtggcagggatgggattccagtcagggaatctggcttcagactcgaatttgccatgctgctctgtgtctcactaatcaatgcaggctcaggaggccgaggagagaaaataacctatgtttttaccttttcattagaggagaaaatagagacatcttcactattgtcttttttttttttttttttttttttttgagacagggtcttagtctgtcacccaggttagactgcagtggagcaatcgtggctcacagcagcctcaaactcctgggctcaagtgatcctcctgccttggcctcccaagtagcttggactacaggtttgcaccactatgtctggctaattttttaaaaattttgcagaggtagggtcttgctatgttgtctgggctggtcctgaacttctggcctcaagcatttctcctgccgtggcctcccagagcactgagattgcaggtgtgggccactgtgcctggcacatcatcctttctcatagattgtaaaggcacatgaaggtcttagaagcacagggagctcattcaaacatatggcttagatttaagggatttctgacctcttccttgtgtgtaggactacgacgatgggagatagtctctccgctccaccttgcaagatatcacctccttttggagcctattatgggatgacttgtgtcctcctcaaaattcgcgtattaaattcctaacactcagtacctccaaatgtgactgtatttggcgatagggcctttaaggaggtaattaaggtaaaatgaggtcattaggtaaaattagatagggatttaaagaggtaattaaggcaaaatgaggtcatattggaccctaatccagcatgactggtgttcttataaagagattaggacacaggcaacacagagactgaggggtgaccctgtgaggatagagcaagaaggcagcaagcaaaggagagaggctttagaagaaaccaaacctgccaatgccttgatcttggccttctagtctccagagctgtgagaaaatcaacttctgttgcttaagtcacccagtctgtggtgttttgttatggcagccctagcaaacaaatacagaacctaaggagctctaccaaatccatgtaaaatgaggaagcttcattaagattctttgcttccctgctcatatagaatccattggattctaacagtgacagttctattttgtgaatgaggctgattactgcttcacaggcaaagtgtatctctacggctgtcaactcagcatttcacagttctcatgtttattggccatcttgataacttggagtctccatctcccttacttctttctcatttcttttccacggatatacaagctagcactttggcagttaaactgctttgagtacataaaggtattaattcagcagctgagccccctttcattattttatccatatatttttgcaagcttaatggtttttaccatttaccatgctcaaggctgtaaaccatttctccaggaatctgactttcaaaggtgcaggctttaaatgagttttgcccttgtaaaaggtcccataaaaaacatctttaggtgctcttaaccaccgagttgatatgtcggccaggactctgcagcctgtgggagagggtggggccacctctctttaaagagccaaagaggttagttccattgtcctaccaggctccctggcattcagatttatttcagccccagagggcagccgtgaagcttggcctcaccctggctgccaactgtggcagaggcttcaggaggatgacttgaaaactgtctgccctggctctttgaagtctttggatgtgaacatactccttgtttctaggtttgggcgagccaggaatgccgacaagttggtcattggagttgctgaagaggcaaaggtagaaggtgaattttcatgctgcttcattaaaaaaaaaagaaatctagccaggagacactcaatagccaaacctagctgtgagtaggcatcatctgacagcaggggcttccgactaagaggcccacctggccactgcaacaggctcccgtgcagtgtgagatgctagcttctgcctggaggacagacaccttgtcgtccttgttctaatgcacacccattcttagggaggagagggataggtgtctgctttgttcattgacatcattcaacacatccctactgagtgcccgtgttgtgccaggtatgacataaggtgtggcagaacagcaattaacagagaaacctggtccctgaccctggggcttgatggtgtagttgtaaaggaagcaaagattgtgtttccctcccccaaaactcaaactctatagctccctcttctttgtcctttcctccattcatttaccccctccacattcttacctcccagaggtttgcatcctagaaagaaggctgcaggaagagagtgacatttatcctagggcatgaatccttaatggtggaattttatcatctgactagaggatattttataataaatgagcatcttgtggcctctccaaggcaaggattctgaatcctttacttgcggtgaaatctatacaatgcattactgtaccctggaggccacagggaggccacatgaaggctgtcccagggcacagagaactgcagagttagagagggacctccaggcttgcaaatcaggagtgcgttttatcatcagcaaatcaacagctgagtggcactgaatttctctgccgaggctcttaagcacctagtttagtttctgcttcctgcaaagagatttatgtccctgtgtagcagaggaataagaggcctgctggcaacgagccccggagagggagtgggatatgcagaggatacactgataaatgtaattgctggaagctgttggtcccagggctgccagccctaagatttaacccctaactctccaggtagtatatggtacaacccactcttgatgagagacaagtgttcacctgagatgcaaacttgagaattttgctgctgtcactacccagtttaaggcctttttttcactgcaggacaaactatttcacttgccaaggcttgagtgatgtaagcttcattattaactactgttcagcagtgtcgacagtatttctttgaaatttcttttgtcagctttaacaaaacctcatcagatcttactgaaaggattggcatctggagctttatttggtaatccaacattgcatcaactcagaagacaaaggagcttgagcttgtcttggaaactcaaggcaaagttatacttgggcatttcaaaaggcagaaagaaatggtaaggaatacagtgccaagattgagtaagaataggcatggccctttgttgagcctgacctcagccagatgcatgatgctgggaacttaactcatttgttgaatgaataagtgatggcccaataaaggaaatcggttgctgctaaaatgatgaaaaggtcagaagtataagatctagttaccggccaggcacggtggctcagcctgtaatcccaacactttgggaggctgaggcgggcagatcacgaggtcaggagttcgagactatcctggccaatatggtgaaaccccgtctctactaaaaatacaaaaattacccaggtgtggtggcacgtgcctgtagtcccagctactctggaggctgaggcagaagaatcgcttgaacctgggaggtagaggttgcagtgagccgagatcaggccacagcactctggcctgggcaacagagtgagactccatctcaaaacaccaccaacaacaaaagatctagttacttcacccttgttctatacaatgttttcttgtttcttattgtgtaatccctataagagtttgcttccccaaacttaacttgaaattaatttcaaccatccttggtaatcatcttttaggggcagaggataagggatgatggttatagccagaaaggagatttaaaagaaatgacttgagaatctagtgatgattagacgtaatgcaagccctgaattcaactgggaataaaaacacttacctgacaggttattgtgaggatttaatgagaatgtttataaagcatctagtggaatgctaggacctaggaggtgacccacaaatgttaacagcatcttctccaccctcccaacactagctggtttttggctaaatcagatggctggattcttttccttccttccatttctaggatttccttcccctttaaatggagaaggtgttcctgaagtaagggataattacttactatcattctgtaaagagatctaatctttgccagagcaaagaatttcctaatcacttgggtaaacttctgtagaatcggtcctagaaaccagctactgagcactgccgctttcaagagatctgtgctgttgcttagaaatgcttattgtttgtccaggaaagaagcttggctgtgttcaagggcggctggctactgtcagtctcacctcccttaacacttttgttaaattcaaaatgagagatatatgagagggatatacaggtcccttgtcaactttttctattgtcttgtgaatctcttggtttcatatcatattctccttaaaattttccctttactgactgtaagaaataaagtccaaacattcaaagctttcacaattcggatattacttttttacttttctttttctttttctttctttctgggtttttgtttttttgtttttgatggagtcttgctccgtcaccctggctgaagtgcaatggcatgattttggttcactgcaacctctgcctccggggttcaagcaattctcctgccttagcctcccaagtagctgggactactggtgtgcaccaccacactcagctaatttttgtatttttagtatagacagggtttcacgatgttggactggctggtcttgaactcctgacctcaggtgatccatccaccttggcctcccaaagtgctgggattacaggcatgatccgccatgcccagcctggacattacttttcttaaaagtctcatctccatcccaccttggaacatgcttaagccttcacatttttctatacaatctttcccgtctctccaccaaactcctattcatccttgaagaatctcttctgtaaggctttatggtaccactgagcaaagttctcatagcacttccatagttctttcaatctcacagtacatttgtgttttaattatatttgtatgtcgttgttctcattagacagcaaactcctagaaacaattacctggcgttaaaagtcttagtgacaagattaaggactatggaatgacttacagtgaaaaagaacaaaagatactttacattcatttaatatctgtagtagatgctttctaggatataattgatataatattatttaatctattcaacaatcatgtagggattaacacatttacagattagtcaatgggcttaaagatagagtgatttatttagactaattaaggaagagcctagaattgaatcctatctgacgctccaaagctcaggctcttgcattacaccaggctggctcaggaaagggcaattatataatcaaaggtacaggctggcattagtaaatagcgtggattgaggagaaaaagcagctaggagaccggagcagtaattcaatagtaaggcaatgagggcctaaataagattaataaatagagaacaatcaatgaaagtgataaatattgataagcaggagccaaatggaaaggtcctgaaaacgaaaagcagattcgtagagctcatcagtgtagcacagcatcttacttgcttctgactgtggctgaaccagagttgaggtgggtggctctgaggcctgtgcagtaggggcaggcagagcacagtcctgaggctggactcccagaggaaggtgctctgggccctggggctgggattgctgctcagcagcttgttgagcagaaaacaaagactcagatcctgcagaaaatatcagaaagcagttaaagcctgtcttagtctattttgtgctgctataacaaaataccacagactaggtaatttatgttgaacagaaaagtattgtctcaccattctggaggctgggaagtccaagaccaaaggactggcatctggtaagggccttcttgctgtgtcatctgtggcaaaaggggaaatggcaaaagaaggagcctactctcaaaagcccttttattaaggcattaagcccactcatgagtgtggagctcttagtgcttaaccacctcttaaaaaccccatctcccaataccattccatcggcaatttaacttcagcataagttttggatgggacaaacgctcaaaccatagaaatgcctattcaagatttcatacaatatgtggtcatgttatttcccccaacaactctaaacctaaaggtaacctgcaaaagcaatagattggaccccaatctactagtttctttcccagccagaatttgttaagttcaaggggatattgacaactgtacagaaactgcagcacatcagccctccaaaaacactaacagacgagagagttgtttgtgagctctgttcagctgagtatcatagtatgtatggaaaggtttttgaccttgaactaccactaaaactgttccaaaatctgtttatatggagtcattctgcatgtacaaatttttaccacagccattttggccaaatatcctatttgccagtctatcatatttggcaagatatggcctgatgctaaacatggaattgatctcttggttagtaggcttcaagtcttgggtctttacaggaattctactcttttctgttctgcccattttttataagcctcttctttctgtaaggtcaaagtagtttatggataagaaccagattattggggagaggaggtaggttgaattgaggaacatttctttttgtcagtacctccagcctattcgtattgttggccagctcactggtacaattaatctttttgattttataacgatggaagttgtgtttaactggagatgagagcaattaattttcttcttataaggttgtgctttctttttaggaagtacagttttttcataagtacttcaattaaaaaagggagagaattgaacttttggcagcaaactcaaacattataagtgaaattaagatgcccaagtctgtgctcaatagcattgtatgggtttgtgatatgccttcaagctcttcatgaattcagttattttgaattcagttgtatttcagcgaccaagacaaaagcatttttgtgaggtgctttttgtttatatcccaggattttatttagaaagaaaactgcacaaatttcactggtatccagacatggtcaactttattgaaaaacaaaacacaaaaaccctactttgctagtggaaaatgtaagttttttgatatttcaatcactaacgttcttctgttacatatcattttctttactttctatataatggacctagatttagtgtatctgtcactttggtttgaaacgtgtgcctgagtttgcttggagaacatgttggggacttatcctcatgtggaagccatcaccccacatttcactgagcctctggaagggaaacaattttgcagaatgtaattctagaagctgggtcacctgtgaaatcacactggcatttgatatccttaagaaaacaaaaaggagcctacagggacaaaatatcatatgtgcaatgtaggactccagacctttcccttcccttttattatgtaacgttttaaaagccacatgttcattcagctgtttctcatcagttttgttttgttcccatataaacacatacacacaaaataaaaacaattttaataaagataaattgttttttctcttaaagtttctttgatagtggaattcatgtaaaactctgaattatgaaaaagttaaaaaaaaatccaaaatagaattttttaaaaaatgcagttctgattgtgtctttcgtcttgtctccccttttcaaatatgttccttcattcttttaaccctctgtaaagccacataggaaaggcacagttttgaaataatattagcaattaaggtttctggtttatttttaacaaggataaataatgcgtcagaaaacttttgcagattatatcaaaacagaggaatgcttgttgttcagaacatgtctggacacatccctagtcttgtgtcatctatttgaaagctgcctgggcgtagtccaatgtgtttacctgatacatattgacttacagttattttagccgtctttgtggataacccaggtaagtgcaagagatgtagcatttccagtagttacagctttgaaaagtgacatagcacactggaaaacatttgcttgcactatttgcactgaattttacttaaacgaagcatggtcacttggatgtccatagaactttatagctttgtggttttcatacacattctctcacttaatcttcacaaagtgcatccctttaccttgagtctaaggcccaaggaattctgactacacatataactaaaatgagtatcgtacaacattccctatggcactcccatagataggatattagctcagccagctccaattaactttgttcttctctgagttaatgcatttcgcagtttgcctctggtttacaggaggtagtgggccataaaagtagatgaagaaggttctatataaaatgggatcaaggttgggtgtggtggcttacacctgcagtaccagcactttgggaggctgaggcaggaggattgcttgagcccaggagtcggagaccagcctgggcaacatagtgagaccatgtctctataaaaaacacatttaaaaattagctggatgtggtggcgtgcacctatagtcccagctctttgagaggctgaggcaagaggatcacttgagcctgggcgttcaaggctgcaatgtgctatgatcgtgtctctgcactccagcctgggtgacagagtgagaccctgtctcaaataaacaaataaaataaaaataaaatgggatcaagcttcgcagtgtgtagaatctcagagtaagagaccttggataacctgtggtccaagaacaactcatggacaacattcctgatttcttcccttttctaaagggatattacacctcatcagttagcttattcagtaagctcatcacttgcaccaatatattctggtccaagccactgtgatctctcacctggctgattgcagcagattctgaatcgtaagcagtcttcctgctgtcactgttgtcctgccccaacgcccgtgctttattctccacagggcagaaagtgatcttttaaaatgtaatcaggccaagttactcgtgggcttaaaatcctctaaggtatctcatcacagttaaaatctaactccaggccaaatgcagtggctcacgcctataatcccaacactttgggaggcagaggcatgtggatcacttgagcgcaggagttcgagaccagcctgggcaacatggcaagacccccgtctctacaaaacatacaaaaattagccaggggtggtggcgcgtgcctgtggtagccccagctgcttggaaggctgaggtgggagatcacttgagcccaagaggttaaggctgcagtgagcgaagatcatgccgctgcactccagcccgagcaacaaaacgagaccctgtctcaaaaaataaataaataaaataaaatttaactgcaaaagccttaccatggcctctgaggcctagggtcctggctcttgagaggaatcttgagatcgttcctgtttcacaacccatgctgtcttttccttctgcctgaaaggctgtttccgttcatgtttgtgtggtgcattccctcattcatttaggttggtgcccagatatcatctccttacaccatcctaactaaaataaataccccccaacccttaagtcactgataaacccttaacctgcttcatttttcttcacagttcttattgttccttgataccatataatacgtttatttgtgcagatgtttattgtcagcctcctgcactagactgtaagccccatgatggaggggacttttctccttcattctccactatttcccagtgttgttgcatagtagggtattctgtgaatatacattaatgagaggaataaattaattattagaaaaactctctttccatttgaaggctgtttatgtgggatgagagatgaatgtaagacttcatccctgggttattgaaagaatgatgcaaatgggacatcaggagccacaggtgtgaagggttgggagggacatgatattgtccagtagactcccttagcctagagaaagggtttgatgaagacctctaggtcatatagcaagcatatcagggactggagtccatgtcttctgagttccctggctggtgttctttccatgacatcatagcatctctaagagtcaggaggaggagatgaagtcaggatacagaaaagtagttaatggaagatgataaattcagcttgggacatgctgagcttgagatgtcactgggacatgcagatacagatatcatgtgctgttagaatgaaaaactgaagcccagaaatgagcacagatacatgcactgattttgtaattgaaactatggaaaaagattttcaagggcaaacaggaaaaagtaagaaaaagaagagtagggaaaagaatgcaaaggctctaacctttgcatatgaaagatgtttgcagagaaaaaaggattcccatggtctcacaaagccaagggaaaaaaggtccgtcgaggaaaagtcaagtaagacaaggactagcaggtagaaagcagtttcagcagtgtggagttaaaggtcaaattgccggggattaagataatgaagatgagggggcttagtggttaagagctctggagttgaactgcctggatttggacccagacttcagcatttactgtctgtccttgggcaagattttaaatctatctatgctttattgcctcatatactaaataggaataaaactaatacccatcacagaaaggtgttgtgagaaataaatgagataacctattttaattgcttagcccagtgtctaacacataataactactcaataaatttaggtattatttctcttgacagaagtgtgggatctaagggccaggctcacaccttcacagcaccttcggaggtcaaaatgggaggttcacttgagcccagtagtttgacaccagcctgggcaacatggcgagaccctgtctctacaaaaaaataaaaaaattagctgggcatggtggtacatgcttgtggtttcagctattcagaaggctgagacagggggatcgcttgagcccaggaggttaagactgcagtaagttgcactactgcactgcagtctgggcaacagaaagagaccctgtcttaaataaacaaatagatagacaaatagataaataaataaatgtggggtctagggggaatagaaaggtaagacataaatttgaaagattaacaggaagaagacttctcttgagtgataaaagtcctgtaaaagaaagaaaaagggaccccaaattcaggcaaagtggttagttttaaggaaaagaaattagacggtaagagaggaacataaaacagattatggggatgagaggagctctggaaagtttgataaagagacatgtattctaaagtcgccttgttagatcagttcatagcccagcttattaagagcttttgagtccctctttctgacatgccacatgttggctgataattacaacaatctgaggtgatatggtttgataagcactgcacagggctaaggatagatcaggattcaaggattagttagggtgtccaagaggaacagaaccagcagaatcaataggagattgtatatataaataatctataatataaattttctcctaaaattatatatatatacttttaatgtgtatataactttaatatatattaaaatctatatgattatatatattaaatatatgtagagagatttattatgggaattgtcttatgtgattatggaggccaaaaagtctcatgatccactatctgcaaactggaaaaccaagaaagctggtggtataattcagtccaagtccgaaggtctgagaatcaggaacccatgatgcaagttctgttctgagtgtgaaggcccagaaactagaagtaccagtgtccaaatgcagcagaagaggatgtgccagcctaaatagagatggaactcactcgtcctttgcctttttgttctcttcaggccctcaccaaactggacgatggccattcatattggtgaggatgattttctgtactcagtctaccaatttgaatatgaatctcttctggaaacaccctcacagacacccagaaataattttttaccagctttgtggcatcccttagtcctgtctgtttaatacatgaaatcggccatcacaaatccttccagtaaccataggaaagcccctgtaagttgccacggatctatcatttgacacagtctggaatcccagggttggagggtgtctgaaaggccatgtggcccaatgtcacccaaattccctggacagcatctccagcagccagttttgtatcagctgtatttggacagtgtccccactggtggctctcggcatcttgcaagcagacctttctcaggtcagattcttcagcacagaaagttctatcattgatttgccatagggcctgaaattgccattttcaatcattcctcaggcttaagcgatcaaaatatccctttaaaccacaaatacgttacctggcaatagagtaaggactgtaagagagtcctttggcagtcacatgggatgatcccaaggataggtaaattctaattagtggtgggagtaggggctaggacacaggggatgctgaagacaataagacacggctgaaagggtcaatcctggggagttgcaacatggatacacaggatattcagaggaagattaatgttgaagtcaaattcatccttcttcacatctttggcctcttctggccctagatgagtattgaggtgaactagtgtctaaagaagagccctggtctgattcattaccaccacgtacaagaggacatttcaatgactggcaatgagatagtccatttaattcattacatagtattcagcctggggttcatgaatctggtctaagtgaggatagctgaaggcattctcagtttacgcatggataagatttccaacccaagccacataaccctaccacaatccagatggagtccagcccattcactccatctgcagcactctctgagctcaactggtttgcttatctttgtgtttctttagtactttgtgtttccttatctgtaaaatactttacctattagaaggcagagagctggattagaggatctctggtgggtttttctgcttctaaattgtatgatatcagctatgggacctccaagacttgagaggtcaatgacaggaggcgggtctaaaggagcttcaaaatttcaacctaggacagacttagggttggaggagaagggaggggactgggcatggaactgcaccttcctggtaagcagctgtttttattgagattgcataagcattgggggccactggggaagttgacaagatttggggagatctaaagctctccacaagcaactccttgagccattctgaaaatagttcctggtgggtgatgtggttaattccttcagctctgcattgccggcaatctccgtcctcctttctgtattaggaaactaaaaggctcagcagtggtgatttgaacattgcaacagccattagaaaatatattttttttggctgggcatggtgactcatgcttgtaatcccagcactttgggaggctgaggcatgcagatcacttgagtccaggagttcaagactagcctgggcaacatggtgaaaccctgtctctactaaaaatacaaaaattagccaggcatagtggtatgcacctgcaatcccagctacttgagaggatgaggcagaagaatggcttgaactcaggaggtggaggttgcagtgagctgagatcgggtcatagcactccaggctgggcaaaagagtgaaatccagtcacccccacaccccccccaaaaaaagtatacctgttttcattgggatattttggtcatcactatatgcagtcatattctcttctgcctgagtgtataatgttggttaaaatttggccaaaaaaaacgtaactttgggaggctgaggttgtaggattgcttgaggcccagagtttgataccagcctgatcaacataacaagaacctgcctttaaacacaaaaaacataaaagggagactagacaattttgttgtttttttttaacaaatccttttcctaattcaaagatgaaattattactattaatggaaaataaattggtttattttgtccataaacactgtgccatttatgataacactagcattaacactaaacactgtgtatccattaatagcagttttcatgttcatagtgctttaccaacaactaattaaacgaaactattttaatttgttgccatggcagtaaatagagatacacagaaatggttgtatccatcaaattcattcttaattcctgaaacataattcagtttgggcaataaatcattattatgtagtgctataatatgtttaagatgataattactatgttcataatgaaaagatttgcaagtatacatagacacatgcaatatcaaatatttatggatgacaatttttatatttgttactcagaaaagattttcctttactgaatctgatagtcaaaaatgaacatttcatctgcaatcattactctgttcatatcttatctattatgtttgctcctgagcatccatctctagaagagtggcattagaatgaaagaggcctcaaaaaaatttgcctctgaattaacagagggatctgttcgtggttagtctgtgaggagaggggatgcagagggagggcagggagaagagacagtcactatcttcacgtatctggagggctttgaagtggaagaacgggagttttgctttgtcctctgggatccagaccagagtgaacgtgtggaagctacagggaggcaagtgtgattcagcgtgatgtgaaggcctcgtctggagtcaaaaagactgggcccaaatccagactctgtcccttctgcaagtctggctacctaaccactctaagccacaagcctgttgcagggggtcatctgggaacttccaaaataacacacccagtaaagcactgaggccttcacctggtacctagcgagtgatgcatgactgtcagctctttatgggatagtatttgtctttaaaaggatgttaaatgtagaattactgctttgcaaggcagtgactcacttctctggcacgggaagtaatgaagcagaaactggatgaccacctgttaaaaatattgtctaagggtttcctgctttgagggtgaggttgaaatcaatgatttccaggtccatatgattccatgaattttgcagaaggaagggagaaaggacgtctagtttaatcctttaaccttttctatattgtattcttgctataatgtgatacctgggggatctaggctgtaacacaatgttattgatgaaatggtattatagagagcaaacttttctcttgtagacttttatcctgaactagccttaactctgggaaaaagagccactaattctgacgccccagtctctgccaggttttcctctgagatccattagatcctttacaaatagagatttttttctcaactagctttcctaagtctgtggcccattgtgttttcacattacaaactatttcctttcatattcagaatgttttctgtatataatcacgtttccctagatatttatttatctttaccttgttgcttaacccctctatcagtgagagggcaatgaaccaatctagatttaaataacatgaccttccttctcatgtatctttctttttctttaacaacattgtatgatgaccagcttctgcccagttgctgaacgtttgtacagaaaccactaaaatccatacagttatagagttgtttgtggggctgtggtgtcaattccatcccaaccacttatgagacttcaattcctgggagtgctgctatcactaagataattgggtatgaatggcaaggaacccactaaaaaccttcaagcaaagctgagagagagccaagggaaaagggaatgagaaaatgagtactagggaggtgaaagggctaaacataaatggtacaaggaaagaaaaaaaaacagattttaaaaaaagaaaaaaaaaagagctcaaagcagagaaggaaggaagagacgttttaaattgtcctgattttcacattacatctacatagttcttggaaatggaagagaaacactattcttagagagaatcaaaagtaaacttcgaaaaataaaataggtagtaaaagacaaaagaaaaataccagtttgctgttagctgttctataatcaatcatttactagaggaactataacagtagaggcggaataaactagtatgtccggtatgtgcactttccatgtgaaaaaaattaaagtagaaaatctcacataaaaaaaatgttggttgtgtatctttctctatctatgaaataactttttaaaaatcacataacatctttttttctgaaccaaatggattcagaataggctcctgggtttgtctctctgtgtgtggttttgttccgtttgtttgtttgtttgtttgtttgttttgagatagggtcttgctatgttcagtcttgcccaggctggtcttgaagtcctgagctcaagggatcttcccacctccgcttcccaagtagggattataggcaggtaccaccatgcctagttagttttttgttttgttttttactggtgacatttatgtggcattttcctcaaataaaacttttttgaccattaaactagccttcttaatactttcagaagttatttaacaataatatgagcatattcaacttatattcacaaaaagtgagatgtaatttctacactctaacattaatgtttaatgttcatcagctataagttactaatattttctttggaaatattttcctacctgaaaaactttaatagcagatgaatgtagcttacattacaacataaatcaacttggattcctttcttttttttttttttttttgagacagagtcttgctctgtcactcaggctggagtacagtggcatgatctcagttcattgcagccttggcctcccgagctcaagcaatactcccacatcagccttctgagtagctgggactacaggcatgtgccactgtgcctggctaattttatttattttctgtagagatggggtctcactaccagttcaagacccaggctgaccttgaactactgagcacaagcaatcctcccaccttggcctcccaaagtgctgggattacaggagtgagccaccacacccagctgctttcaattttaatttgtttctaaatattttatttaacatatgaacacgagtgataggcagataaaccacatctcacttaccatgtgtgtgtgtttgttggggggtagtgcaagtggatgaactgttgaacttttaaaaataaaaattcctcaacaaactttatgtcttttatataaaataaaaggaaattatttttaactgtttgacaaatgaagacagtgtttagagtaaaatgaccaggtagggtccattggtttcagattagcatcctgtgttggtcccctcgctccaggtgttcagaggcctgagcatcccattcccaagtcatgttcagtgtgcagaaaggatttccctaagcaggctatcatttctccaaaatagaagagattgtgggatgcgtctaattaggaaattttcaaagtaaaatattatgatgtttctatccaaacaactgtatcaggaagagtctttaaaagggttttctcatctgtaaactgagattgagttagataatgtctaatgcctcttttagttctgttttagttcagttctatgagactaagtgttttgctcgtgggtttatttttctgcccctatttagttaacatacataaacaaattgatcatcagaatgtcacccattttcctcccaagtagcacccagcagcactatgatgagtcaaatatagttgttgttaatggatttgcatcctaagtctccttattagagagccttttagtccatttgttgggagggaagggaacaccctcacctacatatgtgtttgatacttttttcagattgttcttgactttgtcatatcaaaaagcagaggtcagctcaacagaaaatattatagaaggactttgcatttaccgtatagtactctgttccctatgtgatttttctccacaaagtagtatgccaaatgttattaaactgataaatgctttcaagatacttgatccacatttctttgaacaaaataattctcttccagctttcaaacgtataataaataatatgcttattattgatacttgattgagtgtagtttgtgctaggtattagtcaacggaagtaatcatcccactttaatagaaacccttaagtttcagtacatgaacacaatagaaatttatttcttgcttacttgacaaaatatgttggtgaatgtcctggttttgctggacactgataatcctacagtagacagagaggagaatgcagatgctgtcttgcagattgtaggtgctaggcatgaagtggtatatcgtgctgctggtacatagtccatttgccagaactggtagcatagccccacatagatacaatcagactgggaaatgtagtcttcctttgtgcctaggaggaaattgagatggtttgagaaacacacaggactgtttctgctatgatcttctatagcaaggagttacgtttagaaatgagttgaagaagagggacttgaaagagaaagcagcttatccaggtatatttttcataaccaaaattaggatcgctctcaaaggctgtgacaaagaccatattgaattccttggatgatctagaaatggagtggtagaaggttagaaattaagttgatacggggatggacaggataaatgataattcatagatgataaacggtaattaaaaagaggtttaattggttcacagttctgtagactgtacaggaagctggtgctggcagctgcttggcttctagggaggcctcaggaagcttacaatcgtggtggaaggtgaagggggagaggacaagtcacatagtgaaagcaagagcaagagagaaagtgtggtcggcagaggtgccacacacttttaagtaaccatatctcatgagaactcactatcagaaagacaacaccaagccatggatcattcaccccatgatcaaaacacctcccactaggccccaccttcaatgctggggattacaattcaacacgagatttgggtggggacaaatatccaaactgtatcagcagactaatacaatagtacattatgatcaaatagggtttatctcaagatgtaaatttggtttaacatttgaaaactaatcgtgtaattcaccaaaattacagcataaaaaagaaaaatcatatgagtatctcaaaagatgcagaaacaggatttggcaaaattcaatacccattcatgataaataactttcagcaaattaggcatggacaggaacttcttcaactcgacaaaaggcatgtaccaaaagctaacattctccttaatagggaaagactaaatgcttttcccctaagatcagaaactaagcaaggatgtctgttcttatcactactattccatattgcattaaaattcctgaccagtgcaaaaaggctctttacagagaataaaactctttattcacaaaagtcatgatcagctatgtagaaaatcattattaagattttaatttagaaactagtagaactaataagtgagtttagcaaggtcacagaatgcaagatcgacatacaaaaataaaatttattagtgaaaattttgaaataataattaatgaaataatcccatttacagtagcatcaaaaagcatgaaaatacttgggtataaacttaaaatatgtgtgatatggtttagctgtgtccccacccaaatctcatcttgaattgtagttccctgtggtaagaggaacccattgggaggtaatttagtcatggagatgttcaccctcatgctgttctcttgatactgagttctcacaagatctgatggttttataaggggcttttcccacttttgctctgcccttctccttgctgtcatcatatgaagaaggacatgtttgcttccccttccgccatgattgtaagtttcctgaggcctccccagtcatgctgaactgtgattcaatgaaacctctttcctttataaatcacccagtctcgggtatgtctttattagcagcatgagaatggacaaatacaatgtgcaagtactatacactgaaaactgtagaacattgcttaaataaatcaaaggaaatataaataaatggatatagagtgttcatgttttagaagacaaattgttgagattttcaattccctccaagctgacctacagattcagtgccatcccaattgacatcatactggacatttttaatgaaactaatatattgattctcaatttatttggacatacaaagaacctagaggagtcaaaacaatttttaactggagaacaaatttagaatacttacactacttgatctcaatattactataaagctagtaatgaagactttgcattattgtaagtatagagacatagatcaatgaaatggaagagagagttcaaaagtagttcacatatataatggtcaattgattttcaataaggtaaatgcaaaaggataatcttttcaagaatggaattagaacaacaggacatctatctgggaagagaggaaactccacccttaactcatagcacatgtgaagattaacacataatggctcataaatgtaaagataagagctaaaactataacaattctagaagcaaacatagaagaaaatctttgtggcatgacattagggaaagatatctcaggacacaacatagcacaaaccataaacaaaaatggcagattggcttcatttaaatttaaaacatttgttcttcaaagacacccaagaaactaaatggcaagccaaagccagggagaaaacatttacaaaatacatatctgatacataaattgtatccaggatgtataaagaattcttacaaatcagtaatagtataaaaaatgcatcttaaaaaatgggagttgggcacaatggctcacatccataatcccagcgcttcgggaagccaaggcagaaagattgcttgagcccagtgatagcttgaggctgcagtgagttacaatcacgccactgcactccagcctggacaacagagagagactccaactccaaaaaaaggtagattggcttcacaatctacacaatcttcacaatcttccaactccaaaaaaaaaaaaaaagggtgggccggggggggggggtggtgtgagaggtggcaaaagattgaaacaggcactttatgaaagaagacacacaaagtgaaaataagtacatgaaaggatggatgctcagtatcatttatcatgaagatatgccagagaaactacaatgaaatgctcagaaagctaaatgtttttttaaaagttgacaataccaaatgttggccacaatatagaatgctggaactctcatacattgcagatgggaatgcaacacagtgttaatagcatagccactttggaaaactggcagattttttaaaaagttaagttaaacatgcattaaccatatgtcccagtaatatcactccagggtatttatccaagaacaaacatgtacacacaaaaaattaaacatagatgttcatagcattttatttgcaatagccaaaactggacagtactcaaatgtccatcaactggtgagtggaaaaacaaattatgtatccatacaatggaacactgtccaataaagaggaatgactaaagatccatgtgaaaatatggatgaatctcaaaagcattatgctatatgaaagagggcagaaacaaaagagctcataccataggaatctattaatacagaattataaaaaagacaaaactacggagagctaaaactctgtcagcagttgctctgatctcagcatccacagggatgggattgctgacataggggcgtggaactttgcagggagcatgaggagggggtgaaatatcctcattgtagtggaacttacacagctctatacatttgtcaactctcattgaattgtacacaaaattgttgaggtttacactatagaaattatatttcaataaagctgattttgaaggcaaaaatttttctctggggtttctgactgtggattaatacaaatcaaaaaaccaaacagctgggttcccagaacttacaagtgaagtggctcaaaaagctccactctgtcagaattcagccctagaaatgtgttacctcttgcaggtaactcagcagttatgtccagaatgagagtctttttctttttctttttcttttttgtttttttcccttggagacctctgatctgacagaatgagagtctttaataggaaaattgagagagagctgatagatttccttcctttcagaaacaaatgtacagagattttccaatgtaagggttcataatgcgtgtattgtgcaatgagaattctatttgcagtcctcttaccaactttgtcgacaatgtttacaacatttctctctttagagccactgaaatcaaagaaattcttaaacaacatactattcttgcccaaaataagaagagagaattctttcactcactcattcattcagtaaacattttcctttctttctttgtatatatatatatttttgggtgggggggcaggctcttgctctgtggcccagggctagagtgcagtgatgtaatcatggctcactgcagcttcaaactcctggactcaagcgatcctcacaactcagcctcccaagtagctgggactataggtgtgtgctgccacagcctggcatttttttttttttttttttttttgtagagatgtggtcttgctatgttgctcaggctagtctcgaactcctggcctcaagctgtcttcccacctcagcctcccagagtgctgggattataggcatgagccaccacacctggtctcctttagtgaatatttattaattgcctcctgcatgataggcaatatacccagtgctggaaactaaaagtaaatatataaataaagtgttgtctctgtcttctggagagctctaacttctcttaggtttttgcattcacaattcagaacactgagagacagcttctgcgattagcccttgtcactgaaaacttacaaaaaaaaacctctgagagttatggagataaagattgcttttaataaagctctttaaatcctagaatgttgtaatttggcagtcaaaaaggccatccttcctattcagagaaaagaaatgaaagcctaagaatatgacggtcctatgggatatggtttggctgtgtcgccacccaaacctcatctcatcttgaattgtagcttccataattcccatattttgtgggagggacccagtaggaggcaattgaatcatgggggcaggtctttcccttgctgttttcctgatagtgaataagcctcacaatatctgatggttttataaagggtagttctcctgcacaggtgctcttgcctactaccatgtaagatgtgactttgtttctccttcgtcttctgccatgattgtgaggtctccccagccacgtggaactgtgagtccattaaacctctttcctttataaattacccagtctcaggtatgtctttattggtagtgtgggaacagactaacacaccatggtaaaagaaaacagtttctctattcacactacacttctgacactaaatgtatgggtttttaccacaccaagtaattgtccaattctctgaagatgccaactgggaatcctgaaattatgacatgatctacctggaatttgcgtcatacccgcaagttaaaatcccacaagactttccccaattcagatgccaacagtaagtctggggttgccaccagtacttctgaccaagtggccataaatcagaggttcccattgatactggggggtaggagaggtaaccccaaatgatggcaggacctcaaccctggccagtgcccaggctcttgacacctggacaagtcaaggaattcaccatcaagaaattcaaggacaccgtcaagaaactcaaggacgagtcagaaaatagtgaaagtctggagctttgtggcaaagtgaaaagacacactcaagaaaggggagtgtgagtgtgtgtactcaagagagtgagtcatgcccaacggggtttggagtttctacctttatgggtttctttaaccaaggggtggattattcatgaagatttctagaaaaagataaagatttctcagaactgtggtgtcacccatgtttacaccaaatatgggtgttccatgaactattatggcactagtgggtgtgtgatttagggtgttaatgagtgtgtaatgagatcctaggtgaaacctacgccaaatccagcaccatgttgagtctggttggtcttagtcaacttggccctcatcctgcttttcagggtcttattggtccctagtatatgcagctctttcaacagctcctttttgctagtcatgagactgctgcttggaattttctgttctgctatgactatcctgtctcactgtgacccctttctcaggattgataatttactagaatagctcacagaactgaggctcacagacactttacttatgtttactggtttattataaaagctacaactcgggaacagccaaatgaaaggaatgcataggacaggggactggggatgcttcagggttttcatgccctctctgggcacaccactctcccagcacctcaatgaattcatcaactcctaagctcataagtctcccagttcaagaccttctatagagcttaatctccagaccccctctccccttcctggaggtcggttgtgtggctgaaagttctacccctctaatcatgtcgtctttctgataaccaactccatccttgggcagtctaggggctccatcctaagtcacctcattaacataagctcaggtgtcatcgtaagtggcttctttatgaataaaaaatgaaggactcaggaaattccaagggttttagaaaccaggacaaagaccaaatatattttgttttatcccacacagttagacaatgagttagtgggaccccttctgtcttctgactctgattcaacatttcagaggcccctggcatggtcttcattatctcccttcatcactccctgcagagcagcagtgtctctaagccctgctgtcctcttggagacattccagggtacttttacaatctaaaaacatgcaagcataggtaatttccacaggttatacgtgaaataacgtatctttgggaaaaaagattataagtgaaatgcttagttcagcaaaggaatgttttctatggaatccccctttgatagaaatattgcttttgaaaacattttattattggaataatttggaaaaagtgatttatttgtgctccgagggaaatggggactttcttctcaaatgtttacaggaattattttgataataaagcattttctgattgggaggatgcagataatttttcaggcatgaaacagaaaagcagctgcagctatgtacttaggaaaaggtttggtttttgtttttaatggtcaagtcagtacagtacagtgcatagtgctgtgctaaaaagctttacactcacagaaaattaaatcagggcaatcatgtatgtgataccttgggaccaaactttcatttgtcgtttatccggtgtatcctatgtgccaaagactgtgaagcagtgctgtcaatagaattctttgtattcatggaaacgttctagagctgcaatgtctaaatacagtagccattctcagtggctcatgcctggaatcctaactctttaggaggctgagactggaggatcacttgaggccgggagttccagaccagcctgggcaacatagtgagaacctttatctacaaaaaaattaaaataatattcagtggggtgcggtaatgcatgtctgtagtctccagctactcaggaggctgaggtgggaggattgcttgagtccacaggaggtcaaggctgcagtgatctatgactgcaccacagccctacagcctgggtgacagagcaagaccctgtctctaaagaaataataaataaataaataaataaataaataaataaataaataaatagtggctatattcagtagccactaactacctatggctactgaacacttgaaatacggctagtgagactgagaaatgaattttaagtttaattttctttcaatccatttaaatttggctggccacgtagtctactagctatggaattagacagcatagctgtgagaaataggaaatacaaagtgcctgaatattcacaatgtggttgtaaatgattgagctagatgtggatggaggattgtttccagcaatatctatccacaaaggacatctctcccatctttcagaattattaccttcaaatataagactctatgatggaggtgattaacttgatatcctatgagcacatatatctacagtgagtaaacaaaatgctatgactctttcaagctaagaagtatgagaagatggtagagtgggaccccttctgtcttgggtgctactgaggtgacagtgtaatacacagcaaagtacgtccaagtggatttgggacaacatctaccccatgcacagattaaaaaaaaaaaaagggtcctgagactttgttctacaatcttggatcccttgtcagtcaaatcaaaactataaaaataagtgctaatgagagaagaacatgaggagatggtgatgacagctgttgcctggctctactctccactggaagagagctgggtgctactctccagccccaagcctagtaaaaggagttcaaagagacctgttggagaaatcccaaatggttcctggaaaacactgaagatggtggcctcgctcatgctccagaaaaccaatggaggttgcttcttcccacgaaacctagagtgagagggttgaccaaccgctttgggatagggactagggaagcccttgctatgtggatgggatcagcccacactcccagagttgctgaggcaaggggcatgtgtgagtgtctcttgtggaagagatgtgggccacatgcaatagagttggcatggagtctatcttcttggggtccacccagtagggtgggtgagagagggcaaggctcagcaggaagaaatgttccagtgggtacataggactgaggaactggaatagaggaccccacttaatatggtttggatgtttgtcccctccaaatctcatgttgaaatgtgattcccaatgtcagaggtgtggcctggtgggaggtgattgaatcatggggacagatccctcatggatggcttagcactatcctcctggtgataagtgagttcttgctctgagttcacatgagatctggttgttttaaaaagtggggtacctccccccaacccttctcctgctctcacaatgtgacatgcctgtccctgcttcaccttctgcaatagttataagcttcctgagtctcgccagaagctgagcagatgttggtgctctgcttatacagcttgcagaaccttgatccaattaaacctcttttctttataaagtaactagtctcaggtattcctttatagtaacacaaatagattaatatatcatccaccctccctttcacaactgcactcttccagttgaagcagaggagaagatttaatgctaagtcaagtttagactaaggactgcatagtttaattattgaattgacactatgcttagaggacctacaagtaagctgaataactgggcctgcaaagtttttacataatgccaggggaaagtttctcccactgaataaaaggatcacagcagatagttttggtcaaccaggaatggaacttattcaaaatcctggttatgatacttacatggatttcattagattttctctttacaattccaagaagctatgggttttttttttttttgtaacaaaaaagcaaataaaatataaatcaatttctgtcagcttggaaacctgtatattgaccaaatctgtctttttagttaattccagacgtcattatttatgcaaaaaaaaaattgggagtgagtattagtaacaccgggttgggcataaaacatagcttgagacaaactgagattgctagaattacaggcatatagcactatctctttcattcttcctgaaaataatagaacagttttggtaaaaagagaagtgatgattgcaggaggtagggagagagcagaacgcagacactgctgattgaaaactgtagaaaggaaaaggtttcatgtaaaaataatctgaacatattccattaaagaacattcttttgttttcctcctacttcactgactgctcgtttcagattcctctgcatgttcttactcatctccctaatttctgagcattggagtgcattaggctctcctcttttctctttaccatccactcctttggtgatctcattcagtttcatggatgtaaatatcatctctgttacagctcccactcctacctgtcccctgaattctggttttgtatatccagtggcttgcctggcactcctctgctgaatgttgaaaagttaactctaacttaacatgtccaaaaattacagcctgatctcccatcctaaatcttgttacttccacagtcttccccagttagttaatgtaactccatttttctggtagttcagtcccaaacccttgagtcatctttgactctcttttataatgtacattcatgcatcagcaaattctgtgagctcaatcttcaaaatatgaccagaatctcaacatttcttacctccttctttgccaccaccctggcccaagccaccatcatctcctgcttgaattgttgtagtagcctcctaatttacctccttgcttccaatacataataccgggtgattctggcaaaatctaagtcgatcatcctacccctctgctcaaaatctaccaagggcagttaagggtctttacaacaacctataaggtcccacttacgacatctctgaatacctttcacctggctcactcagccctaggcacactgaccccttgctgtgctcaaaacacgccaggcaagacctcagggcctttgcacttatagttacatatttgcatggctttccccctcacctcctttaggtgtttactcaaatttcacctctcagtgaagtcttctctcaatatcctttgcaatcatctactctcctgacgctgtactgcttatgccttatccctttccttgttttgtttttctccaagacactcagcatcatataacatcacatatatttacttatcttgcttattttctgtcttcccaagctccatgagggaagggatgctttgtgctccgctagagtcagtaaactatacctagcacatggtagatgttggataaatatttgtcacatgaatgaatgaaagaataactacccataagaaggataataaaaaataaactgaacctttattatagagacttaacctcagttattcgggtcttgggggaaaggtgagctgagtctaccctatgccccggaccaccctctggtctaacatttcttgtgcacttactatactccctcctcagttttcctcttttctccattctcttccgacccctaaggacatgaaccacatttctgctctttccttcttgtctcccatccctctcacccacccagcatacactcagcattcagtcgagtcccaccaggcaagtaccgtggtgaattttgtgtcagacgtattctctcagcttcatcttgagcttttgaaatccaagcatatcatgattttaggtatgttgactatttctgcattgggtagtggcaaattttaattgaaaaatttttttgttgagcctcgactacagaccaggcacagttctggaagctaggaatacaataacaaataaataagactggcacttatgttctgtattctaatatatcagtggtttgtatgcagttattatatgatctataaggcatcctatctgtgcacttaagcagttgtaggcagcccgcttattgaaaatactgtagaggttagagttgcttatgtatttaaaataaaaaccctttcctttaaatgcatattttaagactcttggattgcttgagaattgataataaagaggagtgagccatagatcacaatggaaaaatacttagtttttttcttttttgacgtgcaatgactcacatctgtgaaatggcaaaactcataatagagataaaaaaaaatgagttgatgagttttaagtttaaagcattaacctgaagcctggggaactcatctgttttcatgattccttccatctctgttttttttgcttggcatttatttccagagctaagtaaattacctaagctttcaccaggaataagaaacttatcttctggctgggcgcagtggctcacgcttgtaatcccagccttttgggagaccgaggtgggcagatcataaggtcaggagatcaagactatcctgtccaacatggtgaaacaccatctctactgaaaatatcaaaattagcctggtgtggctgtgtgcgcctgtagtcccagctactcaggaggctgaggcagaagaactgcttgaacacgggaggcggaggctgcagtgagctgagattgagccactgcactccagactgggcgacagagcaagactctgtctcaaaacagaaaagaaacttatcttctgactctcatgaggatagacttgggtagtcaaatttttgatgttcagacacacttgattcaagaaaaagtattttctctggttttggatcaacacctctatctttaatgcccaaacaaattccaagtggctctccacctctaccttttgcaagatgttctcagcttcagatttattagcgcatgcgtgctttcatgtacacacacatctacatatctcttaagctttcagtctaaaacaatgaattgactattggaacatttctcttgattcaaaattatatgttttttcttttattgaagtaaaatttatatacgagcaatgcacagcttttaagtgtaaaattctatgagttttgacaaatgtaacatcacccaaatagaacacctgcatcaccttaggaagatcccttatgcctcattttttttttttaaaaagagcatttaatattaatcattgcataaaaaatgaaatgccttgaaatcctacagttatatatgaaagaaacttgagaggtcttccaaaatttgaaaacatattaaaagtgtaaatgttattatcagtaataaatgcgagggtgggattttcctaaattgtcaataataaaattgtgatcaaccatgctagagaaaagactgggctatctattcaacccatagaaaatgtcacacaatcaatctaccacttcacacccactaagatggctgtaatcaaacacaaaaacaataatgagtgtgggtgaggatgtggagaaattagaaccttcatacattgctctggtaggaatgtagagtggtgcggccactgtggaaaacagattggaaataaagttatacagtcacgatataacccacaatttctactctaggtagaatggaaaagagaaatggaaacataacagctacatgaaaacttgtacataaatttttatagtagtgttattcctaacagccaaaaagtagaaacaactgaaatgtccatgaactcataaatggatcaataaaatgtggcctatccacacaatggaatattatttagcaataaaaaatgaagttctgatatatgctacaatatggatgagcattgaaaacattatgataagtgcaagaagccagtcacaaagaccacatattttatgattccatttatatgaaatgtccagaataggcaaatctgtagaaacagaaagtaaattagtgtttgccagggactgaggggtttggagggaaaagaggagcgaccgccaatggggatagggtttctttaggggatgatgaaaagtttccagagttgactgtggtgatgattgcacaaatctgtgaatatagtaaacacattgatttgtactctttaaatgggtgagttgtgtggtatgtgaattggatcttgataaagctgttttaaaaaaatctttccaatgagattatcaagagtatgtagccaggctgggcacggtcactcatgcctgtaatcccaacactttgggaggctgaggcagaaggactgtttgaggccaggagttggacactagcctagccatatagggagaccccatcttaaataaatgtaaagttagctgggtctggtggtgtgtgcctgtagtcccagatacttgggtggctgaggtgggaggattacttgagtctgggaggtagaggctgcagtgagctgtgattgcaccactgtactccagcctggtcaatggagtgagatactgtctcaaaaaaaaaaaaaaaaaaaagtatgtagccaaaatacttgaggaaaaagtattgctatggcttgaatgtccctgccaacattcatgttgaaatttaattgccattgtaataggactaagaggtggggcctttaagaggtgattgggtcataagggctctgctctcatgaatgctgttattaagagagtgagtcagttatctagagaatgggcttctgacaaaaggataagtttggaccccatttgcttcccgtctcttgtgcttgcttgctatgtgatgctttccaccatggaaccaccctcaccatgtgctgttgctgtgctcttggacttccagcctccagaactgtgagagattcatttcttttctttattaattacctagtctgtggtattctcttatagcagcagaaaacaggtgaagacaaatattactgaagtgttttaggaagtttattactacaaaatattatgtaggtggtagataaaactattgtgtgatttttctggatttggtaatgtttgtgggatttgtcaactcttagaaatttgtatttgagatttttgtcattctaaataaacgttcatgttgtactaaaaaataaatattcaataatctgggcttttcagtgaccttcagaaataggaaggattaactgtatgcatgaataatacatgatggaatttcatcttccttttcttcttttgacctgcagtatataatgtcttgcctactatatagtctctccacaccacatacattagggctcatgggaagaggtgggggaggaatatgttattggataaatatacactagcccatgcctaggtggtctgcgtgcctcctttctttttttaccaaggcgggtgcttgtgtattctgacactgaacttgagcactgggggctatggtagcagaaatggggattcttacttcatttttaatatttccaaaagcctaacaaaatatttacacacaaaatacatgctggcaaaaatgaaatgtcaatgtttatttgatttgctttaggcttcattgacttagtagtggtaacactggctaatttatgctgatcagaacctctaaccattttatctttgattatttataactggacgaatgaatgattatttaatagatgtgatcagctttataagtacaatcttaaaatattttggcttcagggataaaaccaattaaaaatttcctttgcgatggaaattggaaacacatttctgtggcttcacttatgaaatgctcctctattgaacattcactataggccaggagctttccttaatttatcatgctaataacacttctgtatggcattattaacccaattttataaatgaggaaacagaggctcagattatagatgtctatgcccaagtcccttaactagaaatatcaagtaaatctatgtccaccctgcctcctatatgattacttttttttgtttgtttatgagttggttaatttcccaggtaaaggccagtaggccagtggtcaagcctcagggtagcaactacattttgtactgggtcttacttttgatgctttgccaacaaaaccgtcaaggaaggcaggagttgactgggaataggcacactgggactgtctctgtagggtatgtacgcaagggtaaagggagatcacaaacgagaaatatgcctgtattcgtccattttcacactgctgataaagacacaccggagactgggcagtttacaaatgaaagaggtttattggacttgcagttccacatggttgggaggcctcacaatcatggcgtaaagcaaggaggagcatgtcacatcttaagcggatggcagtaggccaagagagagcttgtgcaacaagcgctcccatttttaaaatcttcagatctcgtgagactcattcactatgacgagaacagcccaggaaagacccgcccccataattcaatcacctcccacaaggttcctcccacacacctgggaactgcgggacttacaattcaagatgagatttgggtggggatacagccaaaccatatcaatgcccaagtgactggggtgcttccaaacctacacagctgctcacactgctgctctggcagggggagcatgagctgcggacgtttttctgaagttggagtgaatttgtataaaggcatacactccctcatgctggctcctctggtgggtgtccaaggcttcctttgatagatgcagatggggcagccaaggcaaagtaggtgacttatgtggccttggtgcatctcagctatgctcaccgggcagcccatgctgacatggtgggcgagatcgtggggccaccagggaacctgactccactcccatctctaagcttggccaagtcagtcacttctcgttattggggcgtcttctacctgtcacttgaaaaagactgttctttggaacaataaggcggtaacacatacacaggaccaccctgtagccggccacacaggttccgcctccaggtgcttggatctacttaacggacctcccagggggaaagatttgcggtctctccgtccctctaccaggggagggcgccgttccagcccttgcctctgcggcacagatcaaaggacggaggaaaaaaggtgcgggtccggggcactaatgttcgaaaatgcagttttaagtgacctctccccgcgcacgcactgtcggtgggggcagtcccgaggccaggctgcggggcgcctggggggactcgcctcagggggaaatggccctttcagggctcgacgggtccccgggactaaacgctccggccgcggatcggtgccgggggagcccggtcagagaggccgggaccccgagggacgcctaggtgcgtgtcccgaagcccgcgtacctccagccccggcgagacggcgcccaactcgcggctccagtcacacggcccttcctgagaggaaacaccagggaaagcacctctcacttttctcagggtgggaaaactgtgaaggaagaagacaaagcaacaggcaggttttcgctcgcgggctggaggctgggcccagggcgggcgcgcggctgcgggaggcagcggacggtccgggccgctcgagggctgcactgcgagggtctggatcgcctccagcctcccccggaggccccgcccctgccctggagaccccgcccccgcctcggaggcccagccacctcccccctccccgaggcgtcggccccgcctctccgccctccgccctccgcccccggggcccgccaccgccggcccgcctgcgccgccttcgctttgacgttactgggggccgggcgggcggctgccgcgggctcgcagcctcgccagcctccgccagggtgcgcgcgggccgccgcctctcggcagtcccgggagctcaacaaagagcacgcggcgctggccgccggcactcgcgccctgaggctgcggccccggagcgcccggcggcggtttcggcgcgcggccgggctggcgatggaagatggaaggaaggagcgcagcggtgagctccggggccggggcgcgggcgcggggtgcgcacgcggcgccgctgttcgacgtggggtttgtgttgctttgtcgccgctctgtcccccaggatcccggggccacctgggtttgtgctgtctggataggtgcagggtgcgatttttctcttcgcgcttgcttgctttgtgttttttaggagcccagcagggtcaactttgtggtgttaaggtttaggggttttagttcatacctcggctttgaaaacctcagactttggagaaaagctatcaaaagaaggcaacatgaaagaggacctcgtatgccgatctttctttgcccggtcagcttgtatttagggactatcacgtttctgtcagaaagaaagaaaaaaagactaaactaaacaaacttgaattgagcgagcaaacggacaagggaagattattcggtgcaattcccaggagcttttacagatgtttaagtcattctgttttacatgcatttaactttatccgccgttttcagctttccgttctggcgaatgatgttctgaattttttttttaaacacattaacaccgattagaggacgtgggtttagaatgttgttggtgacctaaataataaatgtttcgttttgccattcccctcgatgtcaaaggatgttaaacgcccactaggcagaggatggaatgggcaccacgatttcattttctagacactggttctcccgatagcgggatccaggatttccgctccagaataactcttgagtgggtccaggtgttggtgtagggaagacggagatctggaaaattactgtaagtgggattctggcaacaaatgcctcaatgcgttcgttgtaattgagtatgtgcaaaggattttgcaaagcccggtagctaggtaagtaggataggatttctgctttcaagaagcgtgcttgagagcttgcctgggagagacttatgcgtaggctaccatggaggatctcagaggaagcttctggcctccgggcttggaagttctcagagaggagctggcagttatgctggaccttgaaagggaggggttgattggatttttgtgagatgtgagggaaaggatgtcccctgctaaaggaaagggaattcactttctacccttttccaagaaatgatcctttcttttctgagagtatttacaaaccaagaggttttcttttcaaaaagtcatgaaattcctcttcagcagttaaaagtgcaacatgctcaacatcaccagttaagcaaatgcaaaataaattagcaccttttcaaccagtttttagtggctggctggatgtccttccacaacctttttatatccatccacaagtgatttgtcttgtaagatatttcattaatagaagctttttgtactaaaaggagtagagtggtatcaagaaagggacttggatctgtaggtaggacacctagcttagaggctttgccactgactgggtgagtttttgccaccgtcttgggcaaattatttaacttctgtcgctacagtttcctggtagggtgaggggattaggtagatgctctttcagagccttctagccctaccatttgatatttccatgcctagacacgttttatgcattacttattcagtgatgtactcttaatttcacattctaaatatctgtttgtgtgttctgtgaatggatcagcactcttatcctgaccattgaatgtgggagagtgattagagctacaaagctaaaataaccttattacggccaaattccgtggttgaatgttgttgttgtttttttttttttaaatgcgagcataagaagcttgatttgccaatcttaatgtgtgttttctttaaagaaagttttgttgacactgttcatttgtgaccaaagaataacatataccttattatgtacattgcacttaagcaattcaattctgcttttaatcagatactagtaatttaaaaaattgagtaaccttggaaattcttacaggctagtaaatcttgggaatttggaaataaaaaaataaagtaagatggaagtagctcattgaaaaagaaaaatttaaaggtactttcagtcaatggctctgccctctttctaaaaccttgatatttacatatttgtttgccagccctgatggaaaattatttgagtggaatttagcgtggcattacattgaaaaaacatgtccatggtactactacttttggaggtgattttttttcttttatagaaattcaggtgtgatttgtcatgcattattcataaactaagacaccagtgtggtgataggttaattgcagtcttggttaagagatgctgaggcaaaaccatgtgaatattaaaatgtgtatctgctttggcttaaagactggtttgtttgaggtttacatggggtaatgtcatttggacattatgaaaagagtgtctttgggtttgggttggattgggaggtgagttatggatagtgatcgtttccaatttttggaaaggaattcagacatgattgaagttgggtcagactgtaaaaaataatctggtgaccaaagtctgtggagtttagtatgtgaatcaggcttataggaggctggggatctagtgtgaccttgaattactgctgttgtgattctcaccatttaggggttcttcccggaccgtctgggccaagcacagaggtccttggcttccctttgctaagagtggaagtgttttcactttgaatattgcctctcagttcttcctagttcttttacagttaaaccagcctggctttcatttaggagagtacaggatccatgtgaaattctccagagcatttgttcggagtgcccatatcttgacagcttgtgttgtttgtgatattgtatgcagactcagggatttgctggaaagaatttaagtggtggcattattttttcaaagagtgtttctgagttacgttgaccatctttcaaggacatttttcacaagctccaaattaagtagtgttgtagtggctgttgcaatttacaatggagaaaaaggataatttgcagcatatagttaacaagttattcttaaatccaaattaccaaatgtccatgcctcatttgaaaataaggcataactcaacattaataatgaatctttgcgtgtgctatcttatttatataaaaacagtgcatgtccctgcagtgcttgtttgctctaccaaaagaaaggtttttcactgcgcccagaaggtcaacaaacttgggcccagttggtgcctagtggggagggactttgttgacacatcagggcacagaggtggcagagcattttctctcttggtgacaccggtggtgtgagggatccgcccgctcttctccccttcctgcatgtcaggctgcggccatggcagaccactcactccttgaggcttacttgaggaccactcactcctgagccatctggtttgaaattccctttcctctgagtgtacatcagtgagatgaatcagaataatttatacatgttgaaggatatttttaaaagattattattggagttagggatttaggataactgggaaaattaacattttgacctaagctggtgttcttttcttacatggtattttcacacgggtcttctgagaaagcagcattttctaagtttcttgttaagtcctgatttttctgttgttgttgttgacacaagatctcactctgtcacccaggctggagtgcaatggtgcgatctcagctcactgcaacccctgcctctcagactcaagcaattctcctgtctcagcctcccgagtggctgggaccacaggtacacgccactgcgcccagcttaatttttgtatttttagtatagacggggtttcatcgtgttgcccaggctggtctcaaactcctgagctcaggtgatctgccttccttggcctcccaaagtgctggaattacaggcatgagccaccaggcccggccaagtcctaacttttggaaaacgcttatttcgagtgatattttcctggcatggggcgtttttacaatcacagctaatgtttattgagttcttacttgggttgtctcccttattccccatgacaacccatgaggtcagtagtgtcattatttccattctgaagtcaggagaggttaaggaacctgctcaagatcccacagtgagtaagtggcagagctgagactttaaactcaggtcatccaattttcttaaccaccattctgtttttatgtctcaaagttagcattgcgtgttgcagaaactgagctctttggctctaatatttagattattcgagtcttggaatctgaatattggatgactaattcatcaccgaccattatacatttgttggcttaatagtgggaccagatttgttgtttggctcaagagatagaaatggtgtaattaaacaacaacaacaaaacccctggggtgtctaaaaggatctctgtaggaccacatgtaaggagttccacgtagttatgtgtcattaattggaattcacaataaagcagattaacaaattaaaatggaatgtattttaatttctttttaatttctaatttaatttctaattgcatcacctcagagaagtgatctagatgcttcaaccacagagggtgttgacacagtgaaggctgcttttccttgttatttcttcccatgagctggggcttagagattgttaagaaaaggagcttgaaacaatgaggaggaggatggggaatgagccgagggcattcataagaccaggcggcagctgctccctgtttccctggccttctgttctcagacctttgctaagaaaaagtgaattatagaaatcgagcagcttggttttcttatgcctgtttggtctgtggacaagagaagtagaaaattttaatagaagcagctgtagcttcttttgtttggcctctaggagattactggttaagggccagtggaactgcttttctctgtatatggaaacttacatgcttttttgaatgtagattttcaaaaacttgtactttcaagaagttatttgataggcacagttttgattgagtcataggacactaggagagtggaaatttaggtataagagtgatggcacagacgatgccattagatggctgctgtcttcgtgactgtgttattttctggcgaagttatattggaaaaatgcttggaaattgacagcaggctttgtgatcttccagagtgtctcctctgactctgccttcatgtccctacaaggtgcaagtagtgagtgtttgaagaggcaagatatttcttgcatctgaaactttgtttgaatagcaaagttacttttgggcagatttttatgtttcgccgattcatttctagtggctacaaaaggtctgtcagccaccttccccacccgctgatgcttatatctccctataaaaatctcccttggccgggcgccatggctcacgcctgtaatcccagcactttgggagcccgaggcgggtggatcgcctgaggtcagcggagttgagaccagcctggctgtcatggtgaagccttgtttttactaaaaatacaaaaattagctgggcatggtggcaggtgcctgtaatcccagctacttgggaagctgaggcaggagaatcacttgaacccaggaggcggaggttgcagtgagcagagattgtgccattgcactccagccaggcaacagagcgagactccctctcaaaaataaaaataaaaataaaaataaaaaatctcccttgaagaaaaattaaccattgctttccatgagctaatatctgaaagtatcaaggcagagtctgaagtacagatattattatgctgttgatttaagcattcagcaaatattaagtgcttacctcgtgctgagctcagtgtacactccaaaaaaccttgtccactgacctaggcaaacctcacttggatcgtactagtgcgagtcaaacttcacaatcagcaaatactgaaactacagtacctaagaactcagaacttgtgaactttatagaatcgatgcagttactgcctgaatcagcattgttcaatagagcttttactatgatggaaatgtcccatatttgccctgtccaataagatagtcagtagctacatgtggctgctaagcatgtgaaatgtggctagtgagatttaagaactgaattttaaattttatttaatttcgataatttaaatagcttcaggccgctagtaactactatattagggcaactttacagcaaaagtgcttttttaatagatggcattatctgtcctgggctgtcatttctcactctctctctatttattttttttgagacagggtctcactctgtcgccaaggctggagtgcagtggcaagatctcggctcactgcaacctctgcctcgggctcaagcgattctcctgcctcagcctccagaggagctgggactgcaggtgtgcaccaatcatgcctggctgtttcgtatttttagtagatacggggtttcgccatgttagccaggctggtctcaaactcctgacctcaggtgatctgtccccctcagcctcccaaattgctgggattacaggtgtgagccactgggcccagctggctgcagttgactttttgttgcaagctgtaggtggttccctaatttctagccctctttgaatctgcctagtatcacagtgaataatcaggtgggcagtgctatatatcaaagctaaggtgttttggggacacctgcagagctgtcttggaggcccagttgattttcattgtagatgaaattgacaggaaaaatgtctgaatagcatctgtattggcaaggattgtgctgagttttaaagataggtaagtgaaggtgcccgtgtccagtggttagaaataaggaacattctaataaggcagtggaacagaggaaaaaggtcttactctttatccccaaatactctgtagtgacaagtctggaaggtagacagtcacattcgcaggctccaggatttcttcagagttagccatgtaggagtagtcttgaggatagcagtgtgaaattctcatggttagacctctgttgaaatacattttaattttgagttttgtaatttgtggtggaaccacagtatcaaggcataacaatacaaaagcgtggggataggaagaggagaaagaatgacatctatttagtatttattatgggctaggtactatgtgaaacatagtatgtgtgagtgtgtacatgcatgcatctgtatgtatttatatattctttttttttttttttttttgagatggagtttcgctcttgtcacccaggccgggggtgcaatggcgtgatctcggctcactgcaacccccgcctcccgggttcaagtgattctcctccctccacctcccgagtagctgagattacaggcacgtgccaccacacccagctaatttttgtatttttaatagagacgggtttcaccattttggcccaggatgatctgaatctcttgacgtcatgattcgcctgcctcggcctcccagagtgctgggagccaccgcacctggcctatatatcctttatagtattgaaaggtaggtggtgtctccattttcagagggtgaaattgaggctcatggagattaaatgggatcctttttttaaacaactttattgagatattcacatactatacgattcacccatttaaagtgtacactcattgatttttagtatgttcatggagttgtgcacccatcaccatagtcaattttagagcatattcatcacttcaaaaacagcccaggccaggcacagtggctcacacctgtaatctcagcactttgggaagccaaggtaggaggatctcttgagctcaggagtttgagaccagtctgggcaacatagagtgagacccctttaatagcaaaaaaatttaaaaattagctgagcatggtgatgtgtgcctgtaatcgcagccactcaggaggctgaggcaggaggattgcttgagcccaggaggttgaggctgcatgcagtgtgtcgtgattgcatcgctgtgctctagtctgagtgacagaatgagaccctgtctcaaaagaaaacaaaaaaaccccaaaaattccagacccatgagttgccacctctccccattgctcctatccctcatcacaggcaaccactaatctattttctgagtctggattttgctgttctgcacatatcatgtaaatgaaacaatacaaaatgtggccttttgtagctggctttttcctcatgttttcagtgctcatccatgaagtagcatgtgttagtacttcattccttgttattgctgaatagtatgccattgactagatgggtcacattttatttatccgttcatcagttgatgggttgtttccacttttgacagttaggaataatgccattctgaacacaagcatacaagttttgtagccattctagtgggtgtgaggtggtatctcattgtggttttgcttttcgtttctctaatgactaatgatgatgaatatattttcacgtgcttattggctcgtattcgtccattttcacactgctgataaagacgttcctgagactgggcaatttgcaaaagaaagaggtttaatggaattacagttccacatggctggggaggcctcacaatcatggtggaaggcaagaaggatcaagtcatgtcttacatgtatggcagcaggcaaagagacagcttgtgtgggcaaactcccatttttaaagccatcagatctcttgagacttattacaatcaagagaacagcattggaaagactcaccccggtaattcaattaccttccaccggcttcctcacacgacacatgggaattgtgggagttccgattcaagatgagttttgggtggggacaaagccaaaccatatcattggccatctgtatattttctttggagaagtgtctattcagatcctttgaccgtttttaaattatattatttgtctatttactcttacattttaagcattgtttttatattctgggttgaagtctcctatcagatatatgctttgcaaatagcttctctcattctgtgggttgtcttttctgtttcttcttcctgacctttgaaataagtgaagttctttatcttaaacagagcaccagagggcttagcacagttctaggccctcacgtattttccaaagtgagttaacaaaactttcagtatgatgacttgtgtaacaaatattgttttttaaatatctggttggaagaaggatggagatttaacctttgcctgagctatttgagagggaccacaaagctctgcagacttgagactcttatgtatactgaaaggaaattttggaagccagttctctggagacttttatgtatagaaaatagtcttctcctcctggattagacagagaattgcttgaaaggaggacaccctacctagaagacccttcttgatctttttagatactgtaatgtcatgatctaaatagtgtttcccaaacttgtctgtcaagaattacctggtttcagatttctagggctgcctgaagattctggtacagtggttctgaaggagcagtcttcctaatcaccccatgcaagtcttaagatcggaatgtttgggaaactgatctcacctggtaataatgatgaccttagtggttgcccctagaacctaattagttctctttagtgggtgtggtctccagttgacaaacatccctcgccagggagattacaaggagctgatcaagccagtctggctacattgcttacctcagcactgggtcttgatccaagacaacccaagtccccaaccccccaccccctgccagtgtggtagagatgtgtcataaaaatttaagccaggctcacagacattttcaagttgtaaagttgccaccactctcttgggaggaatcctccctccttcttccctcctcttttaaaatgtgctcatattttcttaccattgctgaatctctggaggcctcccatagtcacacagatctccatgaaactcaatggggagaaaagggcatggaaagaaaaataaacattttacataatctctacactttgcttgttttatgtggttgattaggatctcctgaagaatttcaggagagtgagaagtgtgaagttgggagggggagactcacttacctgacctctttatttttgttttttaaagacggggtcttgctcagttgcccaggctggagtgtagtgactactcccaggcgccatcatagctcactgcagccttcaactcctggcctcaaacaatcctcctccctcagcctcccaaatagctggaactacaggggtgccattgtacttggccctgttcttctcttaaaggatattctgtgttaccagaggcagtgcagcatagtggttggagtgtgcccttgaattggatagtctgatttgcttctatctgtgtcaccttgggcaagttattttaacatctctgtgcctcactgcatcattacctcatggaatacctcaccaacatttagtggttagaaggggcttagacagttttggaaagacagtaagtaggcagtaaatgtgacctggatggtaggttatacttagctgagtgggaactggaattattattgcccttcttaaagtcacacacctattaaacggcaaaactggactttcttgtaccctagactgtgattgcctacaggtgtgctttatggaagccaggagaaaaattctaatacacttagctctctgtttctatgggttctgcatcatgcattcaatcaacctcagatcaaaatatgtggaagaatgttgtgtctgaacatgtatggacatctgtttcttgtcattatttattcatgtagtataacaactatttacatagcatttacattgtattaggtattatacgaaacctagagatgacttaaagtatatgggaagatgtaaatatgttatgtgcaaatgctacatggttttatttttttcaacttttaactttcagtgtttttctatagaaaaactgcacataaaagaataaagaattcatgcagtcatgccaaatgaccatcacaatcaatcttgatggtactcttcagtagatactagaactactaagttgatatatgcttgttccttaaaaagtatacctcatcaaggtgaaataaatgcgataataggaacggtaagaaccatgtgtttataagtgcctcagggtcaagctcttacagtaagaccagaaagttacacaccctagaacaccagcaactcacaaggaagacgggggagttgtcgccttccttccttggaggtctttaggctgggaaagttccatgtaggtgtgattttgcttgaagatagagatataaactttatgacctctcaaagtcactttctggccaacagctttagcagttctaagaaggaacagtttcattttgccttcaagggatgttccttttctgtgtcctaaggcagggtgatcagttagtgagagaggatgatatgtttgcaccaagctgctagcagaaatgagtgtggctcagctccagtcctggcccttctccccttgtctagtcaacctcagccagtgcagggtacccggggagggtcaccgttagtcggcctcaaaggcgctgttgctggctttcacatattcagacttcttcttgtgccttgtccacagtttctgggggatgctggggacaccgcaggaagtactgtctgtcagtgatagggaagcttctgctccttggtgaatggttggatactctttggtcatcctgagatgtctgaatcctgtcatctgaataccttccttctctgagcccggggctgctgcctccaccaaggctgaggctggagctttccttgagatccaagacactggaggaatcaaagatttttccatgtgcttgattcctatacagattcgatgcttcgggtacaaatctccacttgttagccagtcagtcaaagcagagaatttctaaaggcctttgcaccgagcagcgagaccaggcaatagggtcagccaatgagaaaactgccactcttccagagacgctggaactaaggtctaaataagatcagtgtgtcagtgtaggtgcattgactgcaacaaatgtaccgctctggtgggggttgataataatgggggaaactgtgcatgtgttgggggcaggaggtgtatcgaaaatttcctcaccttcagcttaattttactgtgaacctagaactactctaataaataaagtctacgggcctgggcaacatagtgagaccccacctctacaaaaaagaaaaaatttagccagatgtgatggtgcgagcctgtagtcccagctacctggaagactgaggagggaggattgcttgagcctaggaggtcaaggctgcagtgagttgtgatcacatcactgcattccagtctgggtgacagagcaagatcttatctaaaaaaaaaagtcattttaaaaagataatacatgtggaagcatttagcactgtgtttgcgcgtggcaggtgctcagagaatgtgtgcgcttagttccttcttactcattacatcactttgtataagagatttgagcacctttgaatccccaaatctatgaccaatccccacttatgccccactttaccgatggacgactatatgtggtgctttggcccagggtcctcattcaatatgtttctttagcgaatgagttaaaccccataggctgttacatagctaagtacaggaaccctattaagaatatacggcagagtaggtgctctgatatttagcttcgtctaacggcagaatagaatttcctgagtcagcaggatttctggcctgatcacttttttgctattggcttcacagtggcttcatctcctgttttggagacagggaattttccccattccctgggctgcttttagagcttcaggtgtgtgactttcattaatagctctcttgcaaatggcaatctaggacataaaagataagagtaatgtgttactatggatttcctcacccagctctttcccttctggcagagacttctgatagaagtagataaaggcttaggctgtgttcaccgggtgtgatgtagcagtctcagagatctgtttcattcattcttttgattgtatcaggttttttttctctctcttttttttttttcagacagagccttgctctgtcagcaaggccggaatgcaggggcatgattctagctcactgcagcctcgaactcctgggctcaagttatcctcccacctcagcctcccaagtagctgggaccacaggcacacactaacatgcctggctaatttttgtattttaactttttgtagggatggggtcccaccatcttgcccaggctggtctcaaaccactggcttgaagtgatcctctcaccttggcctcccaaagtgctgggattacaggtgtgagtcactgtgccaagtcatattttttcattttgggtgcaattcttcctaccttctcggtgtggcttgtatatcagttgttggcctctcatattgctgtgtcctgcttgggaaagaaagtctaataaaatacaatatcatattctaaaactggagcttatgtaaagataatatagtttatagatttaaaagaacttgacaggcctagaggaattaaagccgaaattttagaagcgttactaaaacaaatgtatctgtgattagtcagtgagaaaatattatcatttataaaatcattaagtaatgattcagagggaagttcagtaagattcagaggggagttagaaagataatggtaattccattttttaaaaaacttgggtggtgtagttagtatacagaggtatttccttcatgaatatttgtattttataaatattttgtaaagttttattttgcctctgtttagtaaaaaataattttaaaataaaaaatttgtcagtagaattctcttgtggccatttaatggcttctttctaaagcattccatttagcaatacacctctctctctcattatgcttatgtttgttttacataatatttaagttacataattttggtagcaagtacaaccaggacaaatccattcaggtgcaaacacaactgattcttggtaatcgccacctcagtcatgtgggcagaatttcatgagcttgctgtagtcttaagaccacagcctgagcgccaggtactgattttttcattctgtttctttatctgtcaccagctgtgagcagcaggtatgaatgggcatcagccagcatgtcttcccgggtaacttgtgtcaccttgtgagacatcctggagttggttaattggagggtggttaagaatttctgctgtatacataacttcagaaacaaaagcaaacctgttatggtctaaggaatgaaaagggttattataaggtagagacattaggacattctttccattttgttctaaaatcacttttggcatttgtctgcctcacatcacttatgttgtgtacaaagctgcttccctcctgaataatttatttctacatctaaaatgtttgctgagattattttgctttcctttcacctggaagataattttaggtttttaagaaatgtggtttataaaaatgggacccaccatgtccatctacagagtgagtgagttactaaagtataacaaaaacgtttttttctgtcttgtacttgagtccagaagttcactgaaaatgggttacacctggaatttatgtatcataactataaagtgctttgtactttgcatcataatttctctttcatctaaagaaatcaaagtccattatattagcctggctacattcacctgcttgcagaaagggtggaccttttgggacccatttttttgttttttgtttttgtggagatggaatctcgctctgttgctcgggctggagtgcagtggcaagatcttggctcactgcaacctccgcctcccgcgttcaagcgattcttctgcctcagcctcctgagtagctgggactacaggtgcatgccaccacacccagctaatttttcgtatttttagtagagacggggtttcaccgtgttagccaggatggtctcaatctcccgaccttgtgatccacccgcctcggcctcccaaagtgctgggattacaggcgtgagccaccgcacccggcccaggacccatcttttaaatgagctctggtgaagcaaggtccagggttttgagaaagcctagcacccttggagtgtttcagggcatctctcagttaagagagctttttctttacaatgggccagattttgtatgtggttaatttaattatcaaattggcgcagctttgtcttttccacggtatctgaatatatgtgcataccaagtgacttatttaaaatacaactcttttaaaaggctacagggcgtactgtaataggtcatatgcagttctgtgtcacagtcacttttccttcattcatacattcattcaacagatggtgtttgagtgtctcctatgaggcaggcattattttaggttccagggatacagtggtcaacaaaacagacaaaaaaataagtaaaataaaaattaaaaaagaaaaaaatccttgttcttacaaggtaagacagacagtgtatgagttgtgtctgcatgtgcgtgtgtgtagtatgttgacagtgtgaagcccttcagggaaaaataaggcagaggagggagtttgggagggggtggagttgcagttacaaatgggtggtcaaggatgaccttgttgaggtgacgcatgaggaaagacctgaagaaggaaggtaagtgcaccgggaagagggcacagcaggtgcagagccctgaggcagagccatacttcctgccttccaggaacagggacaccagtgtgactggagcacagtgagcagtggggtcggaccggacaccgtcgccaggtcctgtggggccttgttgctattgcaagggcttcggtttggactgagagtgagcagagaagcctgttagagagtttcaaataaagatgggacatgatctggctgatgttcttggaggacatgctgctgctgtgtctcatgagaatagactgaagcggggaagagtggaagtaggaaaaccagttgggaggctgttgtaacctaggtgagtgagggtggtggcttggaccaccatggtatgttttgaaggttgagtgggaaggatattctcattgtctgaatgtgggatgtgagtgggagaaagcatgggtgacttgcaaaatactggcctgtgcatcttgaaggatggaggtgcattaactgagatagggagaagctgattttggaaaggatcaggagctcagtcagggagctgtctggtaggcaggtggatatatttatctggattacagaggaaggggctgggttagaggtgaacatttgagagttgtcagaatatacaaactggatgaaatccacagggagcgaatgtcaatagaaaggaaaagaagttgagggccaaaacctgggctgcttccacactgagattgaagagatgagaaggcaccaataaaggagaatgaaggaaagcagcgaatgaggggaatcgagagtgcgaggtcttgccagccatgtgaaaaaaccacttcaagcaagatgagtcagattctcccgggaagtaaagtaaaatgaggggcaaatgagatttgacccagggatttagcaatggagatgtcattgctgaggttgataaccaactgggattatagtgtagtagtggggaccaaatgttgatcagtgggtatgtaagagagcgcagaagtagagaaacggaaacatcaaatgtagaaaaatattgcaaagatttttgctgtaaagagaatgtgagaaatgtagctgcagggagaaatgaggtcaagagatgttttaaaaatgcaggaagtaacagcatgttcgaataccaatgggaaagacagtaaagaggaaaaaaatatgatgcttcatgtagtagcataattcccaaaggacctttggtgtaatttaaaacagcccaaatcatctagcttactgttgtaaacactaatttttgttaatgctgttgatttttttcaacataaagtccttatcttcccatctccatcaaaaatcaaaactgtttcttttgtctgagccgttaaataaatgtcttttgggtatgaattgtgtctgctcatcttgttcaacctcagggagtccctagttctgttaatagttatgcaatatgcatggatctgaggtacactctgtccacatgttttcagtaactgatgacttctttagctctcatctgaggcacagattccccaccgtccattaagcatgtataagatcacattttccaagaatttattcagtcaactaaatgttcattgcatgcattaaacacaaaaggccccatgtttccaggtagcaaccacagggcaacagatgggtaataagagtaagaatttaaagaaaccggtgtccttggatcttgtgtggatgaccagttgtttcccagacattactgtggaaatcacctggggacattgttgaagtgaagattctgattctttagttctggagtggggcctgagatctgcatgtttaacaagctactaggtgatgctacggatgctggctgatatggtttggctgtgtccccacccaaatctggtcttgagttgtagctcccataatccccacgtgtcatgggagggacctggtgggaggtaattgaatcatgggggtgggtttttccctgctgtttctattgatggtgaataagtctcacgagatctgatggttttataaaaggcagttcccctgcacatgctctcttgcctgccactatgtaagatgtgcctttggccgtttgctttcctccatggttgtgaggccttcctagtcaagctgagctgtgcatcaattaaacctctttcctttagaaattactgagtcccgggcatgtctttaatagcagcctgagaacagactaatacactggtgcacctcattttgagtagaaagagatcttagggtaatacttcctggtttatttttcctccttagattttgcttctgctcttcctctacttctctattattgccacattgggccttttccagctggaactttcagactcagaacaacaatatattgttgtagcatttgttgatagcatttcagtatctccgctttccactctgcatttttattgatctttgcaaaaaagctactggcgtctgggagttttgtttagtaattagatagctgaagagactaggccaagtttcatttgcattatgtagggaaggccagacttctgggtctcattcacatcccaaggccatatttgtcctagacctctgagtacatgctttggagctataggcaaagtcccagtactggggccaatttgccagttcagttgtcagcttttaaattctctggattcctacttgctaaggccaaatctcttcagtaaacagctcccttgctggaaagcagtcctttggctttgttataaataaattttgtcagcttgtggaaaatagaataaacctttgaaagtcaccactggctaatgaaagcttcttagatggctctagactggacgcggtacttaaaaagtacctataaaaggatatgtctcggtgggggttggagaagagtttgaaattaattatctgaactctgaaaattcctgtaaattctacatttagtttctgctatactttagaccatagatcttgtcctgattttaatgaggcatactttttaggatcttctgtatgggtgctattcaatagaaatatgatgagaatttcacaagtaagtttaaattttctagtagccacattaaaaaaaagtaaaaagaaatcaatggaagtaatgtaggtaatatattttatttaacctactgtgtccgaaatattgtcattttgacaaaagcttagtgataatttatattctttgcttgtacttagaaatctggcctatattttacactcacagcacatctgccatatttcaggtgctaaatggccccatgtgactgtcgtattagacagcacaggtgtatatgcagagcagctgcaggtatgacaagcacagttttatttgtttctttatctcataattctctgttaataccaacacatgatttgctgtagtgaggcatatatggttagttaagtattaaaataaagatggatttttttacagtaatcttaaaatctaccgtaaaaacaaatggatgtttcagaaaatagataattataaatatgcagagaatacaaacatgttgattgacttcagcaatggctaacagagatgaggacctataaaaattgaaaatgtctgagacttccagataatacatttttagcaatgttgtttaggataatttactgcccctcataaggtagataggtcctgtcatgactcacattttatagatgtgaagcctgagaccagagaggttaagtaatttgccttagatcacacagtgggtaagtggtagatctaggatacggaactctagtcagtccggttccagagctcactcccttcaactctgtgccagactgccttctcagcacatgtcagtgatacatacatttgcttcatcttttaaatggtatgattgagggatagtgctctttagctgaaaaaagtgattgatataatcaaattatattgatataatcaaattgtttgatataatcaaattgttctggaaaacagaggataaattaactccttaaataaatcataccctgtttgccattaatttaagtcttaatttcagagttactttatcttggtttctgattgatcttcgatttaaattgagcctcagcattttttctacctatccctgatgtggggaaaaacagctaataatgtataaggcaaactttcagtgttattgagagctaaagcatacaactgaattggggggataagctctaatactcatgaaatagtattacaatttattgttactagcaatcacagcagcagtagccatttattgagaggttactatctgccaaaccttgtgttaagactttacactcattatcttatttaactgttaaagcaatgctgtcaagttggttttatcttcatcaataaataagtgccagaaacagtgccactatactctgaaacaatgagactctgagaattattttattggattctgggtgtcacatttaaagggggacattaacagtgaacaggtatgtgagtggtgaaaaaatcatgtgatgtcaggagaggtcatagaactgtgatctttaacctaaggagagaagacttagtggacgtaatagttaccagtaagtgtttggaataaagaatatgatctaaagagaaaactgactctggcaaaaggagtacactcactctgtctttctctgaggactacagaaaagacatttacaagattttcttattttggattttaatccaattttaatgggacagaggctatgtcactccctagatattctggattaaattattgcatttggaagatttggattatacaagaaattaggaattgacctttggatgaggtgtctatttctgattttgtaataaattgcgtcctttaatcagattatttttatgatagaaataattattgagttgttttgtcaattaagttggagattgtgattaataatacaatatcagagctcagacggaccttagaaatcttggagtctcatgtcattttgcaaatgaggaaacagaaagaaaatgaattaaggacaaagttggacaagtactcaggtgttgacttcaagtccactacttaaaaaaaattatggtttctaatgtatggatgaagaagactgaatcatttctagtacatttttaaaggtcctgttgaatcttcttcagagttaacaaaatgaagtagcctgaagttcatttgttctaattagggcacacttgagtcctttttggttatcttatctgaacttggagttcagtgattttcctaaagaaaagctttcagttcgtcaacttcttttattgttagtgttttatttccctggaaacttgtgcatctttttattgaaaggataagaaaggatatagtggctctctgaatttatccattcattcaacaagtatttattgaggtgtgtgccagacacttccaagcacaactgtagggtcattagcttttactgtgagatgagaaaccatcaaattgttttgaacagaagattagaagattttttttttttttaagtatcactaacaaattaaaaggattccctgggagtttcagcaagctatagtcccacttgccttgatttaatgagacataccttttgatctcagcacacaattgggattaactgcagtttgaggtctgatccttattagttatataactgaattcacaataaagcctgaaactttttcataaaaacagggtataaacctgttaaaaatgttctaccatagactggtttggaaaccattatgaattcatgatggaatttgaccgacctaggtttgatggacattttcactgatgattcaattttgggcaaacgtattagtttttctgagcctcagtttcttcattagtacaatgagggtaaaacttgttacgtaggagtgtttttgagggttgaatgatttaagggaaatcgtgattgtgaaatgctcagccccatgtctggcgcattgtaaatattcaataaaagcacagccattattttgataatttagtcaaggggattttaaacatggataaaagttgttttgaagctagattgagggtgctaattcagacccttaatttatttttactttagagctcagacaaaatgtctttaatgcctttgtctaaaggtcctgacattgaaacaagcattaaaatgacacctctaacttaattaacactgtttgttttgcatgtatatgaattagtctttttaagtgtcactggctgttttggtggtgtcccaaattgacaaatgctccctccctcattccacaggtattaccaattttggaccaattctggtggttcagctatcaataaaagcagtcagagaaggccctgcctgtaggtcacagttgaccctagccacaggacacccagggaagtggtgtactgtgaaacctccccagggagtttcaggagtgtgtgtgtgtgtgtgtgtgtgtgtgtatgtgtgtgtgtgtgtgtgtatgtgtgtgtgtgtgttttctgttgcccaagattattgtccgagagagtaaacacatcaccttatgactctgtagccaagttcacttctgtagtaattttttgtttgtgtatttttaccactgaaattcagtctgacttagttcaatactgcatctaaaccagtgtgtggtcaaaagtattaaatttgacttgctaatctccacgcgggatgagggagagaccctatgtaaaactgaattgggcccatgtaaaacccgtgtttctggtgccccattttccttgggctctggccggcagcttcttctaccccagttatgtatttcactttcctggggctgaagtatcagctagctgagctgataaatttatctgggttaataggagagagtaagaggatcatctggtccttttaactgtctttggaggcaggattttgcttcccccactcctcagttatttgaaagcactttggcaaaactgagatcactgcatgactgttagtgtaacactgcagcttggttgatctgttcgtgaatgtgatcatcaggggaattacagatcatggaaaggtaggtggaggacaggcctctggagaaggtattcataggcacaggcaaccttttctgattgtgtaattactttaaaatattctgttttaaaaaatttcaattaaaatttgtttccttattaccagaaatatcctggtaattgtagattgcccgggtggggatgaggagaagttgccagtttaagccaaaccacatggagtgagaatgagggaaaggtgacttcaagaagaaaaaaggtgttctgttaccaggagaaggattgctggccaggcaggaacagcagatgtccctggcagatgaaatggcgctggccagaggaagcatatgccgtacagaggaatatcaagcacaatggccatgggcagaaaagagcgtcgcatatgaagaactgagagaaggccaggcggcggagccaagtgaggaagagtgggtggagcggtaggaatgaaggcatgggattgcaaagataagctagggccagaccatgcagggccttacggctaaaggagggtacctggattttatcctgtgaacatggaaggtcactgaagaggtttaagcagtttagccttttaaaaaaatcactctggatgccctgtgaagaacggattgaagagggcaagaaaggaagcagagggattaatcagtgagcttttgtaggtgagagatgaagatttcttggacagggatggtggcagctgtgatacagacaagtggaaagataaatgagccacattttgtgtagatcaacagaacctgatgattgatggggtgtaaggaaaggaagaatgacatagatttctgcctcaattaatggggattcttggagttgccatttattgagatgtagcactcttgttggatattgctttgtgttacatccttccacctagactataagcttcttagatcaaagataaggcagcatttcatctttcttcaccattgattctagcacagtgctgaggcattagaatagccacttggttgggcatatgtcaggtgggaagttgatccaaaccccacttgcagggtggctcttgagaggcagcttaaaggaataaaaagtgccatttgttaggatatttattgttgttggtttttagatttgtttgagatgatgcaagttatgtaagaagaaggtactatgagcatagaaaatgtaatcagacctcagaactaaggagatttgcccaagataatttattaatagagctgggacattctctaatccctagtattctcattaaatcatctaacctatacttgctattttgagtaatttttgtttcctgactaaaatctgtgtttcttttttctttgatgctcttctacatgttaaaaataaaaccaaataccaaatttattcacctttgatgctttgagcttctcagttccttctggtctctttttgtttttctcctttccaaaactcattctgaaggacccatgaaaagagactgaaagcagaagaaatctgtccagtcactcagcaacacctatctgaggtaataaggcaaatgaaaccacttcaaaaattgtcctagaacaaaaaatggcttctagaacattgtgcagtgtctagctccagtgcacaggaggtgctcactggttattgagactcagccccgctaccttgtgtttttacattcatggcctttgtcatctctggcatgctatttatttcttcataagagaattttaaaactggaggaattgaatagaggccgtctgaaaaaagaatacctacggaacccaatttatctttacctggagtcccgaccatgcaggctgctgtttattagaacacagtgacagtcacatggtgggctcggccctggcttgcagtcagctttgaagcccccatggcaaaatggcaagcgcttacattcccggacaaacacacgctttttattccatgtcatttttccattgctgtagacttgtaaaacaatggttaagagaatttcagaaaccaaagttattttccctgctcttatttgcatatttctgttccttaaaagtttctaaggtaaaaaagtccccaagtttggggactctcttccacaccttcaaatcaacactttttaaacatgtgatagtgtcattaatgttcttgtgaacaatggcttaagtagtgtgattggaaatagagctctggaggagcttggcattgggggttgggtgagcatttttgagttgggtaattagtcagctacaaccatgtagaacagaagtgatgattagactaattaggaaaaccatttcctaagtgctgtggtagacccaagggcaatggcctagaaatgccgccttccctgatttatttgattgatgaaaagcaggttttccacttgcgggcttatttattttttaaattagagatttgtttgtctcattttcatctgttacagttttatttccaagataacagagaggcaggagtgtcttattcgcagtttgggaatagggctttcgtgcttttcctttcattccctttactacacgattctagtggagcagatttatcagggcacttttagtcaaatctttgcaaaggactcacatgttttatgtattcagaattcaattcaagcagcttttctagtgacaggctgctttctggtctcctttatacacctaacttattcatgtgtatatatatatatgtatttatttatttattttttctaacattcattggtgcttactttgtgccaagcactattaaatgcaagggattcaagtatatctagcaattaagggctttgttttgttcggtgttattgccccattgctagcatggtgcttggcttatggtaggtactatgtaaatatttgttgaaagaatgaaaaacttaaagcctaggcccttgttttgtattttttgtgtacactcagatttagattatgtaattgcagctcattttgcaaaacggatttattattttctttctttttctttttttttgagacagggtcttgctctgttgcctaggccggagtgcagtgatgcagtcacggctcactgctgcctcttgggctcaggtgattctctcacctcagcctcctatgtagctaggactatagcacgtgccaccacacctggctgacttttaaaaattatctgtagagatggggtttcactgtgttgcccagggtggtcttgaactcctggcttcaaatgatcctctgccttgtcctttcaaagtactgggattacaggcagagatttttgggaggccgaggcgggtggatcacgaggtcaggagatcaagaccatcttggctaacacagtgaaaccccatctctactaaaaatacaaaaaattagccaggcgtggtggcgggtgcctgtagttccagctacttgggaggctgaggcaggagaatggcgtgagcctggaaggcagagcttgcagtgagccgagattgcgccactgcactctagcctgggcgaaagtgcgagactccgtcttaaaaaaatatatataaaaaaaaaaataaaaaagaaaataaatttctctaaaataaatctcatttatttcctggtagttttaaaatttaagctaaacctcaaaaaattttcttctaaaacataataaataataccgtgagtgttgtatatcttttaaaaacaaaagggtggagtgaaaatgttttaccaaattattaggtatagtttgcaaagcactattatgcatagtatgttgttcgcctccctgtgacggcaccattaacccatttgtgccggaggttgcaaattttttttgtgaaaagatcagaccttggcgatgaccttgagcagtaggatatacataactcccacaagcttagcgttccattaatggaacactaagcataaatgggttaaagtaggcccacggtgtgtgaggtccagaaaagtgagttgatttttttcctcaagtcctcatggattaggcgtgggaagaagttccttatctgcccactgctggctctttgttctgcctcatcttggtcttcccttaatggagtactctcttttgtacccagtttgcaaatggctacgttagcccgttgggtttaaagaatactttaggggcattcagcgataagtgaagtgtctaactcttcaaaaagagccatagtaatatatctgctgaccggataaggaaatacagcaccattaataaaatgcttgtgagattttttttttcaaacattgaactttttttttttttttgctgagaccattttatctcaagaaagagcttatggacttcctgagaatgtgtagtgaagcagaaaaagccagagagaccttactgaattccctgatccttgagtgtatctttcggatacaaaatggggtaataataccaaccttgcaagcgtgttctgggaattaaatcagaaacacagtgcaactcatatgaggtacccagtatttgacagtaaaggcaaaataaaagcactaacaaaaacaagtgaaaaacttaacaccaaggggcgaaaacaatttatgtgcctttgaaaacttgataactgaagttctaatgacagtcatttatatctattcattaatgcagtttctccagggacctctactgttaatccaatttcagttattctctgtatgtgaaagcatcaaaattattttctttttaagataaaactcctaaattcattttgaccttgcacaattaatctaagttaatgaggttttgttacatcattatccaatgtgtattttaaggttctactgctgtgctaccctacattttgtgacctaggaattttagatacaactgtaatcttggtctttaaatagaactttgagtaacaaagtgaggtaggatattgacagcaaactataataataaaatgtaattataatataatactattaatttagagttagaaagtatccattaaaaaaagtatccatgaatgtccaaactaaataggaaatatttatttggcttctaggaaaatgaaatacatcattctaatattttaatatttagaaagaaaagatctcattacaacttaaaaaatgattttttactgataagtgccattgacttcattgaaatgcctgcttttagtagtcaaatcccagaagaaaatgctatttttaggagtatgtttaactgaaaaagctcatatttctattcaagtttaggcaattactcttgacaaaagacaagtaaactaatgtttcatgataaagtccccaagtatctcagacttaagcaaagaccccaaatcatagtttgtagctttattgcagctttcattcaaaatatgttttatatcatctcttaactagggaattcctggtgccttcctattaggataaataagcaagaaacacaataggacagtgattgtattcttaagtattagggaatttagggccccagatattctatatgcagacctctgtgcttgtgtttgttcattttaatgagactccaaaggctcataattttacaggaggtatagtgtttcagttccagaaccaggtaaagacagggcagccctccactctataaaagcaaaggatgaccgggcgcggtgactcacgcctgtaatcccagcactttgggaggtcaaggcgggcagatcatttgagctcaggaattcgagaccaacctggccaacatggcgaaaccccatctccactaaaaatataaaaattagccgggtgtggtggcgggcacctgcaatcccagctactccggagactgagacacgagaatcgcttgaacctggagggcagaggttgtagtgatccaagatgacgctaccgtactccagcctgggcaacagagtgagactctgtccccccaccgccaaaacaaaaaagcgaagcgtgatgggtcagggttaggaccatttcctggtgacattgagctggttaagttggtggatctatgaggggaaactggctgccttcacagcctccaaggtctttgccttgtgcactgcagcttggccgtactaccccacagtcaggttggcagaagtatgatcttttttgtctgtcttatgggataatagtgaatatttacttttattatttggaaaatttcaaatgtgaaaaaatttaaaaacctcaacatttttgtagctacaattaaggaattataatacaatttggtaagactacaaaattcacaaaattatattgtggcctcattttaaaaactgaaagttgttccttcaaatgctcaaatagtttctttgataacattttttgagagcattctttaaaaaatgtattactgccccatttttttggtatttttaatgtatgcacttaatactgtttaactttttaaaataattctggttgattgttttcaaatattttaatgcagtgatgttgtcttcatgggctataaatttgtaccataatgtaaagacattatgttaggatcattttaatgtatgaatacctgggctttaagtaaggatctgttgagaattgtgtagttcagttatgtggtttaacaactagagagtcagctctattgtaaacatgtaggcatagcttgttttattgtgctttgtagatattattattattattattattattattttaattgaagggttgtggcaactttgtgtggagcaagtctttcagcatcattttcccactgtgctcactttgtgtctctctgtcacctttttgtaattcttgcgatattttaaactttctcattattattattatacctattgttatgatctgcgatcagtgattttttttttttttttttaaataatgagatagtgtctcactttgttgcccaggctggagtatggtagcacaatcatatttcactgcaatcttgaacttttttgggctcagatgatcctcctgtctcagcctccttagtagctgggactacagcacatgccaccatatccagccggttaaaacatttttttttttgtagagacggcgtctggctatgttgccctggctagtctccagctcctggactcaagcaatcctcttgcctcagcgtcccaaaatggtaggattacaggcatgagccactgcaccagtcagtgatttttgatgttactcttgtaattgctttgggacaccaagaactgtgtccatgtaagatggagaacttaaaaattgtcgtatgttttggctgctccacgactggtccttcccctgtcccgctattccctgagacacaacaatatgaaattaatccaattcataactatataatggcctctaagtgttcacgtggaaggaacagttgcatgtttttcacttgaaatcaaataaatgattaagcttagtgagaagggcgtgttgaagccaggccaaaagctaggtctcttgcaccaacagttagccaagttgtggatataaaagaaaagttctggaaggaaattcaaagtgcttcttcagtgaatatgtgaaagataagaaagcagaagccttattgctgatatggagcaaatctgagtcatctgaatggaagatcaaatcactacaacattcacgtaaaacaaaacctaattcagagcaagcctccaattcttggctgagagaggtagaggtaaggaagctgcagaagaaaaattggaagctagcagacattggttcataaggtttaaggaaggaggccatctttataacataaaggtgaagcagcaattgctcatgtagaagctgcatcaagttattcagaagatctagctaagaccattgatgactgaggctatgctaaacatcacagtttcaatgtagacaaaacagccttctattgggaaaagatgccgtctggaacttacatagctacagagaagtcaatgcctggcttcaaagcttcaaaagacaggctgactcttgttaggggctaatgcagctggtgacttgaagttgaagccattgctcatttaccattctaaaaatcctagggcccttcagaattatgctagatctactctacttgtgctctataaatgtaactaccaagcctgtatgacaggacgtctattagcagcatggtttactgaatatttgaagccaactgttgaggcctgctgcttagaagaatatttatttcagaatatcactgctcttcagccatgcacctagtcacccaagagcgcttatgtaaatctacaaggagatgtatgttgttttcatgcctgttaactcagcattcattctgcaaccaatgactcaaggagtaattttgacttttgagtcttattatttaagaaatatatttcataagtctgtagctgctatagatagtaatttatctgatggatgtgggcaaagtcaattgaaagccttctgaaaagaattcaccattctagatgccattaagaacatttgtgattcattggaggacatcaaaatactaacatgaacaggagtttagaagaagttgattccaaccctcatggataactttaggggtgagttcaagactgcagtggagaaagtagctacagatttgatggaaatagcaagagaactagaattaaaaatggagcctgatgatatgactgaattactacaattccaggatgcaccattagtggatgaggagtagcttcttatgaatgaacaaacaaagtggtttcttgagatgggatttactcctggtgaagatgctgtgaacattgttcagatgataacaaaggatttagaatattccataaacttagttgataaagtagtgtagggtttgagaggattgacttcagatttgaaagaagctctactgtgggtaagatgctgtcaaacaacattgtatgctacagagaaatcttttgtcttaagagaccattgatgtgacaaacttcatttttgtcttattttttaagttgccacagccacctcagccttcagcagctaccaccctgatcagtcagcagccatcagtaatgaggaaagaccttccatcagcaaaaagattacaacttactgaagcctcagatgattgtcagtattttttttagcaataaagtattttttaatcaagatgtgtacattgacattgttttctttttagacagaatgctcttccacagttaatagactgcagtatagtgtcaacaacttttatattcacagtgaatcactggagtgattcactttattgtgatgtttgctttattgtgatattcactgtattgttgtggtctggaattgaacccacacaatctccagagtatgcctgtatatacagaatcttaacaggaagtcttctaaatacttttcaagtgctagcttacttgttccttataacaacctgatgagtttgttttatggttatctctattttccaaagacacagggatgttgagtaccttatccaaggtcacccactagtaagtgatagaatctgggcttcaattcatttagtctggcactggagcctgcactctttaaatcaccatagtagtctttctgcttcaataatgagtggactttttttgtatgtgtgttggggggtgacctgtgacttttcttgcgtctttcctgatttttacatgtcttgaaaccactatatttcattcatctgttcattcaacaaatatttattgagtatccattatgtggtgctgagggctagcagtgtcctggtggacccttatgttacagcctaggtgcccagcagtcattgactgttttaacttaatgtctaggagggaagacagacataacaaagggaaactcacgggggaggggagcagggacaggggagccagggtgcaaataactctgaaactaggacctgagaggtgtaaaagatttagccaggttgggaagagggtgtgaggagaagagggtggtattccagttgggggagtagctaagtgcgaagaccagcgatcagaagctgtgaaaagagttcagggaactgaaagaggttcactgtggcggaagcactcagtgttccgaattaggagtggggatggtgaagggtgtaaatagtattcaggtgttttaagatcaggcagaagcgtcaaataactgattaactttacactttgatcagttggatatgtttattgtaatttctaggataatgaaagcccaaaagcagcatatagcatctaaacttgagcgtgtgtggagggagagagggaaaaataaaaacaaaactaagtcaaaaagaggcaagaaaggagagaaggataaaatagatgagatgaatagcacaaataagatggtagatgtaaaccctaatgtatttgtaattatattaaatgtgtatgttctaaatgtaccaattaaaagataaaagattgtcagactgataaaacccaaccaaccaaccaaccaacgaaccaaccaaccaacccaactaggtgctactttcacttgacagagagggaatacctccaggagatgagaaatgacaagaggtgaccataagataagctacctccatctccttccctgtctgtctaccctggaagccaccacattcttaggaaagccactggacttcccactctaagtgcagcggaggtgatcctgggagattagcactgtctgggttactcaggtctggctttctcaccagcttgtgaggaactttttggcagaggtggagtctcactcacatacctcgtgccttccatagtgtttggcagacagtaggtctttaagtagcatttatcatgtgtgtacatttgatttccatatgagattgtaaactctttgcagggcagagaacctgttacacctttgagttttccataatatctgctaaaacatagatcagtgtataattgccaaaacatagatcagtgtataatgagtgattcttatttaattctgtcaagattaaatctgatttctgtagaaggatactgttccacctttcaatgatttggaggtttgtttccacagcagagaagaaataaaaaccactttctgcaataaagacctgataacctactttttcttaagtagattttacagtaggagagtatattcttttatttgttcttttctttcttttagttgtagcaagaatttctattaaactcctctcattgggccagagactcttgtggtgttagtgaaaaacttgtcccttgcgtaacaccctgtctacacttgtgagttcattggccagtcactggcctcaactccgagctctaacaagaagaatatattcatttttattttaaagagcatgatttatttaatataaaaataaatgcttcactcatgtataagctgtaaggagatattagtagtaaaataataaaaatattttccttggaagaactgtgggcagaccatatcaaaacagcaatttctggttttggaatgaaagatactattgattctattaatccaaatgccaacagttctctggttgagtaagaatgtgctccctaagagaaaactcacttggcatcatgtaagagctgctcattatgaatagaaagaaattacataatccaaagtgaaagcaagtcattctgcttttaattacagtgtataaaaattaaaacatgggccgagggtctagttggatatacttcttggcaacagacattttggaagcctgcaatgaaaaatacaacaaagatggctatgtgctggccgccccccagtgtcttggtggtttcccgtttagtgactgtattcagttattgtgaaatcacagaattttaaagcaggaaaaagacctcagaagtctcttcttacccattcgtcctccagatgagaaaataagcccacagtggtaaagggattatagtgaggtcatatagcgaactccagaaggaacacaggcatctggactcctgtctggctttctttgagactgaactgcttcactgctgcctggaagctcttctgtggttgtggcttcttgctggccttagtgtagtgataagggggtgggaatgagggtagagggtaggagagaggaagggagagaggttgaaagagagaatgagtcattgtcattgagagggattgagagacagagaagatgatagagaaagacgtatgtctgctttgctgcttctcagaagtggtaccaataaagcagtgctctgaagcagtgtctgctgcatcagtgagctgcggagcctggcagtggttgaggtgtgggaacattctatacctgccactggctcctcctcattcctgcgctgtaaaccccatgttgaggttactgtgtctgtgtttattgcctctagtccagtccaaccatagatgtagccatctcaggttatggagagatgttaaggagaggaggggcaaattgaaaggtgcatgttttagaatttgttaattttcagattttttgaatcttagcaaaaggatttcctgagtataacctcacgtttccctttctacttccaaatctgaacaaaatcctgtgaccttccttgcttactcagagctggacatagtaagagaagtcatcatgcaaaatgattttctggaagtattttgaatgttttagttattctttcccagttcactcagagtccgttatggatttgctgctgtgaaaaaagtgttgaaacccagcgtgtggacgtgcagtgttgcttttagccttgcaggcagtgccctctggccttttcagcaaacttcagctctgagctgtgttacctgctttggctcctattgcatttacctggggcgagattctggctttcaaattcctccctaaagtcaggtgggagcctggcccaatggagaatggcagtcttaggtactgatgatcaattgctgttttccttgctagcgtcatgatatcgaacgtatgggttctcagtaaatcatgtattgttcacttgtttttgctcaaaagtccatctctggttacatcattggaagcctctcagtttaacctcttcctttgtgacttctatgcttggaaataaattacgacagttaaaatcttattgcataagtaatgtgtgttgattttaggaaaatcagaaaatagggataagtaaaaagaagaaaatataaataatttataatccatctcccagagagaccactggtaatattttagtgcatgtctaaatttttaatgtacacttatttacataacattaaatatattttaataaaaatgactttgggctgtatatactgttttttactaacatttctcatatgacatgttctatacatctctcatatcagaatacaattttgtattttcaaaagacaaatctctctatctttttaaatacagataagcataaagaaaataaaaaggcccattatctctcagtccatgtgacatgttaaaatgattagtaataaagcaaataacattagttggctgctgactatatgccagggggactgttttatctgttagctcctttaatccccacaaaagccatcagaagtagttgctattattaatcctgttttacagatgaggatactgaggctaagtgtttaattcccaaagccatacagctagtaggaaatgagctcagatagtctggctcaagaacccaatttttttttttttttttttttgagatagggtgttgttctgttgcccaggctagagtgcagtggtgcagtctcagctcactgcaacctccgccttctgtgttcaagcgattctcctgcctcagcctcccaagtagctgggattacaggcatgtaccagcacacctggctaatttttgtatttttagtagaaatggggtttcaccatgttggccagcctggtctccaactcctgacctcagatgatccacccaccatttcttaaccacactcataccgttagactttaaaaacaaagtcaaacaatagtctttctctattttttaaaaaatctttctctatcagcatgtacagaactacctcattctctataacagccacatatacgtcctttgtatactttggtttaactgtccccttaactattgatggacaatttgattgttttcagatatttgcaattacaagcaatgcggcaatattgtcatactaatggtactgtttattgagtgataaaatcagctactatggataaatgcatagaacagtgcctgctacatagtacgatctgtgatttatattattattagtaatactgcgtgccatgcactatgcttgaattctcaaaatatccctatgaggtagattattgttattatccctgttttacctttgaagacattaagacataatgaggttaaatagttcttgtgtcatgtagtaagtgaaatctgtgatttggacccttttggaacttggctactgctaactacatattcccagcttcaagggggtcagagatggagaaagccttggtattggtaaacattagtaatgtccacatatactcctaccacaagggtatgaaattgcctgtgtcactgtacctttctagtcctgggtatcacagatgctacaatttttaattggtgaaaaatagtatttcaatgtaatttgtaatttatttaataataaggttatacaatgtatctttattgggcatttgtatttctttttttgtgaactgtcttcgtggttttattggatagttttatttttaataatttttataagctctctgtaaaataaagaaattagattttgaattctcctatgcattgcaaatgtctttctagtataagcattttaatgactgtattttacattttatggtgatattatagtttatgtgaatggtgggacttttgttgcttacagtttttcattacaatgctgtcaagagcatccatttattattttctctggaaatttcttagaagtgtaaatggtggatggaagggaatatacatttttaaggcattgattcgtattttctgtctctctagaagaatgataaaagtaggttgaccatcagggtatgtcagggtgcctatttctcaataaccaatgatattacataatattatttttaaaactcttggccaatgtgtatttttttttatgagttagcattgagacattttccatatgtttatttgcagttagtatttcttcctttgtgaattgcctgttcatgccttaagaaggattttgactatatgtgcaatttttaaaattttgtaaaatcagttatctaacagtggaatgaaccttcccaacactgatggtattagagcaaaagatactggaactgttgcaggaaaggaatgaatgtttattaatttactatcataagtcaacctttatacttgttatctcttttactctttctattttaatcttatggataaagaatgagggacttgggtaagccaagtgacttatctctagttccatagttgtaaatggcagaaatcggctacaaacgctcttctgcgtgacttttagcatatgccttccatcccaccaattatagccttctactcctgagccatacagaatcacatcagtagtaagttagctggctgaagcctatggtacatattggcaaaaaaaaaaaaaaaaaaaatttcagaaaatgtttatctagaattattctgtgcatttcagaaacttggtgttcttttatttttatttttctgcaactattttattaagtaccctgatatattagggatgtagaaaacggggggactaggcagagaccttttccttaatagctctgagcttttcctcttccccacccttccaacccttgtcccttttgaaagctttgcttcccacctgccacccagcaggcctcagcactgcagggagtgaaacctctgccagcctcttgtcctttcctcactgttgtgtttcttttcatactctggtacttagaatgtcgctttttctctttctccaatgccatggcaacagtgcatggtaactgcttcccttctggtcaaggaaaaagattttgtatttttttttccctttgacctgtttgtaattagcactgcggtccaccctttcctccagtgaaaagcaaggaaataccaggctgtagtcaagactgcaggacctgctggatgtatagctagcaggtcttctgtgctcctttgcagcagtttaaacccaagcccagcctgatcattgattctgaaacagcactcaaccctccacccctgttcccctgccccttcactgttttttgttttttttttttgacttgatgtgttatattggaggttggttccttcagtctccctgcactagaatgtagggtccaggggagtggggtttccttttgcttgttgctctgtgtgttccctgggactagcgcgtagtggggctccctgagttcttgccgaatggcacaggatttggtagtggaaagcctgatttcatttcatagaatttgctctccttgcgtctttttctctcttaaaggcagtgtctgcattctatgtggccctccctgggaaatgtcagtttcagaggattttgaagtctatcagatcccagggcctgagccaagtcagagcctagttggagtgcattgtaattgacataaaagatttgcatttgaaataactcagaggttggtttgaatcctgttccccacatgtttttagtcactgtctgagtttgaggaaggctttttgagcctttttctttatctgtaacatgggcataataatgcctaccttggcttgaagtgaagattaactctgacaatctatggagagaactggtacatagaaaaataaatgatggtggtaatatggttattagtattttcgttttcttctgtgtgattttctattggtaaatggagttattttatcatttgtattgtaggctactcaatggttaaaagctagattgggtggctttggagtgtgatggtctgggatcctgtcctgctacttaacagcaatgtgacactgtgcaagagcaggcctccatttgtaaagaacagtaaatggtcataatagcagtatcgacctcagaatggacagaaagatttgatcagcacaaagtttggttcatagtaagtccttagtaactcatattctatagtttaataataacagcagaatgaaagaagcttaaacttcatctagtccaactctaatactcccacttcatgtctaattctgccatctagagcaatagagatccaattggtatccttttcagatatggcctttcatatacttaggattgagtcctgttatgaactgacttgtatctccctaaaattcacatgttcaagttctaacccatagtgtgctgactgtatttggaggtagggcatttgaggaggtagttaaggttaaatggggtcataaggatgggcccctaatccagtaggactggtgttcttccaagaagaggaagagacaccagagtgtatacacacaggaaagaccatctgaggacaagagcaagaaggtggctgtctccaagccagtaagagggccgccaccagaatccaacccagatggcaccatgctcttggacttccagccttcagaactttgagaaaaatgtctgttgcttaagccactcagtcttctgtcttgttatagcagcctaagcagacaaatctagatcccttttcttttcttatgtcatcatccccatcttgagggggttttcagttgcctcttcatcattgtcacccttgtctcaatactttcacgtgtcagtgttcttttcaaaatgggaaacctggagatgaactcagaacccccagatggtccaagcattttgggtgccggacactgcccttacagtggaatcgcagattgtgtgaggtagtccatcgaataaacccccaagactcaggtctacattatcctatattgggtctgttatttttgtccaaattcgaagttttgtcttgttaatttcagcttttatttgtttcagaatctagaaaatcatttttttaaaacctcgttggacaggacctttgaagggtggcccagccagcctacctacttgcccagtgatgctttccatgctgtgtgtcttagtttgagctgctgtagcaaattatcatacacagcgtagcttaaacaacaaacatttgtgtctcacagtcctggaggctggaagtttgagattagaatccttggtgagtgtcctctttctggtttacatgtgtccttacatggtgtaaacagagttacctagttttctggcctatttttatgaaggcactgatcccattgatgagggctccacccttatgacctaattaccttatgaagaccctacctccagataccatcatactgggattagggttttaatgtatgaatttggggggaacacattcagcacattgctctcttcctagcagtggctgcctccattggtggaggtactgttttgttgtgaaacttgttccggggttggattccttcaaatgttcccaggaattagctatgttgagtcaaaatctgaccctgtgataactgctgctctttgatcacatctgtctgtttgttattcctgcacctggcagtctcttacagactccctgctcccctcctgttacctgttctgaacattataacagcgttgtatttagtatcattgcagaaaatcaattccatttgcttttcacaagtggaaattagacaaatggatctggaagtacataaataaagtaggagcctagttgacagaaggacactctatttggtttgttttaatgaatagctttcatcagatcatactctatgaaaatagattgaggaaataggctattcattccttattatttgaattagtaagagtcatacctttcttttctgtttaggatgataggcattaaatcttcatctgactctttatagtattttgtttatttttattttttttgacagtcttgctgtgttgtccaggctggtgtgctgtggcgtgatctcggctcactgcaacctctgcctcccaggctcaagcgattctcctacctcagcctcctgaggagctgggattataggcacccgccaccatgcccagctaatttttatatttttagtagaggcggggtttcactgtgttggccaggccgatcttgaactcctgacctcaagtgatccacctgccttggcctcccaaagtgctgagattacaggtgtgagccactgcacctggcctgtttatagtattttagaacaggaagggaccctccgaatcctattttccacatccctccatggcagaattatctttttatgtgccaggtccccttcctttttgagggactcaaaggcagatgtgaggcgggactcaaactccttgtgctgaagcccgggggctgcagcctcattcccctacctctggccatcagattgggcctgtgatctgagcacaatcagccccacccattctggtattttctcaggagagtggttctgtttgtgaagactcttggggccagctaggccagttgatggggtattgtcctcatgacagtattcagggtccagagcccaggcgcatgggaggggactgtccactgaggggaggccgtggtggctgcagtgactcggtcagcctgtggtgtggcaggaccttggctgagctttgccctgcttgttcccgcctgagcctgggtgtccggccctcccagagacagggagcttccccaaaccttgccagtaaacacacaccttttctacctaaactaacttgagtccattttgtttttaatttgtaatctacataggaaggtccttatttgactgttttaaacttgtggcctaggattctggggttttttcattcctgcctaagcacatgtgaggtctgcatggtctcattaaggaatgcattccctggggtggataattgctatttatgtggcagttaggaattttttgtctttttttttttttcttgagacagagtctcgctcttttacttagggtggagtgcagtggtgtgatctcggctcactgtaacctccgcctcctgggttctagtgattctcctgtctcagcctcccaagtagttgggactacagcctcccaagtagttggtactacaggtgcacaccgccacgcccagctaatttctgtatttttagtagagacagggtttcaccatgttggtcaggctggtctcgaagtcctaacctcatatgttcctcccaccttcacctcccaaagtgctgggattataggcacgaaccaccgcatccagacctctcatctttaactgattgattttcagaggacaattctaggaaagactaaatgttttcaccttttcaaaacaggtgctgttaagagaaggaagatggacggggagcatgccaggatgttggcatttaggacatgggaagttgtataaaggtgaaactatgtctgattgtctggtagaaaaattacagtctaattagaaatgctgaagtttttccagacctttagggaattcatcgaattgcaaataaaagaaaataaggaatgttggtttgccggtaattagatatattgggggaaatgaggttgtttcttttcttttctttgttttttttttttttttttttttttgaggcagagtcttgctctgtcgcccaggctggagtgcagtggtgcgatctcggctcactgcaagctccgcctcccgggttcatgccattctcctgcctcagcctcctgagtagctgggactacaggtgcccgccaccacgcccggctaattttttgtatttttagtagagatggggtttcaccgtgttagccaggatggtctcgatctcctgacctcgtgatccgcccaacttggcctcccaaagtgctgggattacaggtgtgagcccgcacctggccgaggttgtttcttgtttttccttttacctagcgtttctttctttcttcaaaaaactagatagtgtttattaattttactgtgcaagcaggaatatacataaacttttaaaattcttaaagctataggtattttgcgcactgttttaaaaaatcccttgtggggagatttttttttaaatatttatatggagaacatgtatctgttgtgtctacagacccataatgatggaactattatttcctcctaaatatttgctcctcgtgactagaatttttggactttgaaagatccttgggtttactttaacttacaggtatgtttacaggaattcaggtctgtggagtaagatagccaaggctaatagttatgaaacatcccatatagtaatttgaatactgaatttacctaaagatgaacattcaaaagatcaagggcatttcattaatgtagtcttaaattattttgctaaacaaagaaggtatatgacctctctttagaaatggccactaataaaaagttgttggtataacataatttttttaacaaggcctaaaacatgcatacattgtctgtcattacagagtcccctgtcacccagaacttttctggttattaacacaaatttatggtgtaccgttgatttctatgcaattgaacgtgaagctaatgttatagtcattttattgctggctgctgttgcatcgaaatttagatgtcttattttcaggtttgaattaagacaatatgtgctttgtaggacactttgtcaacgaatatttgtgggagagggatttttaagagaatgtatggttatgatgtgactgcttcgcactttacagctgttattaaagtagattccagtaaggtaagtcattctggaaggcatttctgaatattacctccttcccctcaagaaatgtttattaagttaatatgttttatgttgtaatttaaagatttaaaagaatattttccttttcatagtagacactttggaaggctatatacttatttctgtgatgttataataactcaatacatgctactaaatcttttttctttggaattgtcttcatatcccccactgcattttaaaaacgtatccccagtggtgttgggcctttatatttttgtgggtggagtttttttttttttttttttttttggagacattttttttttgctctgtcacgcaggctgcagtgcagtggcgcgatctcggctcactgcaacctccacctcctgggttcaagcgattcttctgcctcagcctcctgagtagctgggattacaggcacatgccaccacacccagctaattttttgtatttttattagagacggggtttcaccatgttggtcaggctggtctcaaactcctgacctcgtgatctgcctgcctcggtctcccaaagtgctgggattacaggcgtgagccaccacacctggcccaggccacaacattttaaagtatgctctgcaagctaggtgacagcaagctgggaaatagtttttctttagtcttgagatgtctataaagaagcgtgcatcgtgtgatgtgaaaactggcgtcgaaggttctttcagaataggaattccaaatgatttgctcaggattccttgaaataacgtgtgtggttttctaaggtgaccatttgaacgaggacaattgatttagatatacacattctgcttttaaaataaagtttaaagtcttcttgaaaagtttatggtctcctgtaaactttgcctcagtgtcagagaatcctgatgagtcagaattggacttgcagggaggttttctgagttggagaatctcagatgttgggtagaaacataaggttttcttaattgaagccagtggctgccctgaagtggtgcacagttttgtgtgcgtgtgcagaatttccttctctggcaatttcaggaactatagaaatgtggacataaatttctgtttataaatctggagccaccgtgaggagcttgagatgaatgtctgctgtggtcagagtgctcagtgagttcctcaaagcagttaccagtctggttttggtggtttaggtttggatcttttgctagccttttgtagaacttggatattggaagcaattctcctcgcagctcccaggaatatgtgaatgggccctcgatacccaattctaattctgagcacttggaaaaagtctgtgttgggagaagcctgtatcttccgtcacctgattttcctgataacctgtgtgtatctttcacatgcctccatttctggttaccaactttatcatgtgactcttttggcagctagtagatatttttagtaaatataaaggaattcctcctaccaacatctgaggtcatttgcctttccttgattttctaattttctggttgaaatagtaaagagaaccctaccctgatggtcaaaggttctaagatgttttgtggaccagctcataaaggccttcagcagggcaagtctggtatctgctgggctttctggaaatagttaagtgagtcaataggtagctttgatgttgtcaggtttaatatggaaatagcattttactactagtaatcttaagattttttaatagaaaatcctggccaggcgcggtggctcacgcctgtaatcccagcactttgggagtggatcaccttagatcgggagtttgagaccagcctgaccagcatggagaagccccgtctctactaaaaatacaaaattagccgggcatggtggtgcacacctgtaatcccagctattcgggaggcagaagcgggagaatcacttgaacctgggaggcaggggttgccgtgagccaagatcatgccattgcactccagcctgggcaacgagagtgaaactccgtctcaaaaaaaaaaaataaataaagaaaaaagaaaatcctaagtgggattccatgctgataggtcttacagcccacgtgaaaagaaagccaagtaaaagcttttatggcaggaaatgttcctgtctgcctggaatggtttggaccaggcaagcagattggaattgtttttcctcttaagttgctttgttctgtttttggacatgttttccctgaactacacttaatagcaaagtgcacctaccatcccttctccccctacccaagccttgcttgtgagtatctcctaaagcagcatgcttttaggtatcatttattttaagactaatttgaaaattttatgccaattttgcatttcatttaaaaatatatttaaatatcaaaatcagattttaaatgaccatctattcaaattgagccccaagaagatgtgcccgttggtccggaaacgttgcgtcctcctggggcacactggtttgtgaccctggggatctgaggagtcccctgtttgagaagaacagttgtagggcataactggaagccaggaggtctagggaagtatttttaaaaatgactctatttgtgttttttggtttttttttttttttttaagacagtctctctctgttgcccaggccggagttcagtggtgcaatctcagctcactgcaacctccacctcccaggttcaagtaattctcctacctcagccttgcgagtagttgggattacaggcgtgcaccaccacacccagctaatttttgtatttttagtagagatggggatttcgcagtgttggccaggctgttcttgaactgctgacctcaagtgattcacctgcctcggcctcccaaagtgctggaattacaggcctgagccaccgcacctggcctgaaaaatgactctgtttgacagcctagtataggtgtggaaactctgtgagaagtggaatggcagtccacctggaatgtatgtggtatacagctgcttaattaagaaatccatcttagtgagcagcattttctttcaaatagcctggtatagtcaactctttactgagattcaagtcgactgttttctctgactgagtgctagctgtaatcctgggaaaagttatacagcacattggtgatttgttttttccatcttatatgggagattaaaatatttgttgcctactcccctcatcaggtgttgtgaggattaatgagatcattttagtaatgtgccttaaactcacaagaggaaatgggcacggaaaagcccaaaccccgggtgttatattaccaggagcttaactcaggcctggcatttacgctgctgttatgtgtccatttattttgttcacgtgttgcttttcgcattacaattctgtattaagcttcagatccatctcatgggtgtgaaaatatccacgtgtcaaaatcaagagtgggcctgttggcttcacatgttttcacttgccatccatctccagaatcttgcaagcttgacctacagcttgttggattggacactttttatgtacaccacttactgcattttgcagcttcgagtctatctgtggggactcagctttttcaataactctaggctgtaatttttgagagcattgtttaaaccttgtgctctacttgagtagtaaatggtcacagtggcaaccgggcatgggtcctttctcactagcgtgtgtgatgcttgctgtcactgtcacccccgccgaacggggtaatgggatgagagaacaaggccttaccagcacagcctgtgaatggctccatagaggggacgctggttcctcaagggcgcaacctattcccttgatttcagctggaggaacttctcttgggccttggcatgatgtgctcatacatctttaggtagccaaaacctgacatataactgagtgtgaaagtcagttgccagcatcttcagaaggacattatttctgaatgaccagtgaatgaggttattgtcatagaaaacagcaaagtttaaaataatgttgctatttgggatggcagaattggtgggggaggaaatgagatgggagaaatataattttaaactataaaaattccagtgaagtataatgcttaattgttagcatattctaagcaatgagttagccgcatttaaaaatagctttttaacatgaatgaacctttttatgagccgagattcagtgaagaataagttggtcatgcaaatggtgttttaatagtttatattaaatattttagggctgggatttaaacaaataacattttagagctgtaaaagcaaaaagtctgacctgaaggccacacaaataattatagttcctgaaatatagccctgtgaacaaatctatgccaccttgtttataatctacttcctttgagtttcaaaataagtaaaagggtggcttggatgtaaaaaggaggccactggctttgagcgagttgagagcagtggtagacgcaggatcttttgtgcctctctggggaaaattaggcagttcggaaccactcaggacattccagcagctttggagatcaaggaaggcctctccataaagaagtcaagagtagctggttgttcatgagaccacactttaaggagataatcattgcctctcttgtgaattggttctgaggcaacacaatctttgaagtaaaaaaaaaaaatgctccaggttttaaggagtaaagcattagttttgtgcaaaaaaaagtcattaaggttattagttttgtgtaacaagagttattaatggccaggcaatgtagctcacacctgtaatcccagcactttgggaggcctaggtgggaggatcactcgagcccatgagtttgagaccagtttgggcaacatagtgagactccacctctacaaaaaaaagttaaaacaattagccaggcatggtggcacatgtagtcccagctactgggatggctgaggtgggaggtcacatgagtctgggaactccaggctgcattgagccatgatcacaccattgtgctctagacttggttacagagcaacactctcaaaaacagaaacaaacaaacaaaaaaaacccgagttattcattagatttagagaatggtgtttcttgtaactcttactttaattgaggtattttgcctataaatataggcaagtatatgtagaaactatgcatgtgtgcgctgtcttcttactaagacattatttcttctcttcgtgaagaaagcctgcctactggggctaaattacctgaaacaaacaccatcattcacagagagacagtaagtaagcaagataagcatagaatatgtagggtaaatgacccatctgatctgtttgggcaagcattatacctctcactcttttcaatgacatatttgcttcatgtttcgataatgtggtgtctatattttaactatgaacaaagtcttaaaatattgctatttcattaaatttggagtactgttaataaattatttatacctgaaacattgctgttggccattcattctctccccccatttcttattttctcccagctagcgttgtatagcagaaattcttgtgcaagacaaatgtaaggaactaatcagtgattctaatttttaaacactgtggtggtctctgcttacccctctgaatcggtttgagagaagaaaattggatttgtcttgttgatgctttgcaatttagttggcgagtcgagtatgtataaaataagaaaaaaagagaaaatgctaagattcttgagtgggaatccatagtccacagaaacgtcagaggctctggtatttgcatgagaaaagttttgaaggaaatttttagtttagaaacacaaattcaggaagtcaaattctgtggtttttagtaaatggaaatatatatggtgatatggtttggctctgtgtccccacccaaatctcatcttgaattgtatgcccataattcccatgtgttgtaggagggacctggtgggagatcattgaatcatgggggcggttcccccatactgttgtcatagtagtgaataagtctcacaagacctgatggttttatcaggggtttccacttttgcatcttcctcattttctcttgccgctgccatgtaagaagtgcctttcgcctcccaccatgattctgagacctccccagccatgtggaactttaagtccaattaaacctctttttatccccagtctcaggtatgtctttatcagcagcgtgaaaacggactaatacatatgttgtgtaggctgaaagaactcttccaaggaccatggcatatcttggttccaccaatggcctgacgtgacctttaacctttctgtgtctccttatctgcaagataggagtgacaagagaacctagatcttcaggtggttgtaaagattagtgtggcaagataaagttgttagcccattgcctggctcatagtatatagtcatgcatgactttctttttttaagaaaaaagatttaaaacaacaaaagctctctaggcagagttaattcttcacagtgggaggaggtatttaaacttctgggcaggatgctgtggagggaattagagcttgatagtgaattggaataactctaacccattctcaacctaacactgatctttttactttgtaaaaaaaggcatttcactggagctgcattagcaatatagtttgccattttttttccaaaatattatctcctcctcccaccaaaaataccttttgctgtgtgtgtgtgttgtcatatattcccaactttaatgaaagccaaagatttctaagttttttaatgttgaggaaatttttaaaggcaattcgtggtatttacaacaagctattaaatttatttcatcaattattttccttttcttctctgttgataactttagtctacaacaagattttaagaattgcaatggacctatctttcttttttttttggagatggagtctcgctcttgtcacccatgctgtagtgcagtggcaccatcttggctcactgcaacctccgcctcccagattcgagagattctcctgcctcagcctcccaagtagctgggattacaggtgcccgccaccaggcccggctaatttttgtatttttagttgagatgggattttaccatgttggccaggctggtcacaaacacctgacctcaagtgatccgcatgcctcggtctcccaaagtgctgggattcattatttttaaatataaaatttttgcaaagtgaaagccgatgtcatagattttacatggttttcgcaggaaagcaagccatcaattaatgatgtcctttatgggctggagggagtgagtgctatgtagtggaggaagcacacatacttttggccaggatttaggaatagttttgttaggcggtatatctgatttatcatgttcttgactcaggacaaataaaatatctttatggtaatcttaaatacctctttagaggaatatttatatctacaaataccttctgcatttatttatttgaggcagagtctcgctctgtcacccaggctggagtgcagtagcgtgatctcggctcgctgcaacctccgcctcctgggttgaagcaattctgcctgcctcagcctcgcgagtagctgggattacaagcatgtgccaccatgcccagctaatttttctattttttagtagagatggggtttcatcatgttggccaggctggtcttgaactcctgaccttagatgatccgcccgccttggcctcccaaagtgctgggattataggcgtgagccaccgcgcccagcctgcatatatttatttttatggctcttctgttatttttgtcctccttgtcttaagtagcttgactagtaaccttctttgtgtactatattgctgtgtcattgtgttagtaactgtggactcgtaagtattgagttgtcaaagtaaaaaagagtgttgtttccaccatcactttattaacaatgattctattaagagttcttcagatttaggtaaaatttctctgttactgaatgtctctgtttttcagtagagtagtaaactgtctagttgcactttttctttcaccagtagtctttttgtttgtttgtttttttggagacagggtctcactctgtcacccaggctggagggcagtgactctgttactcacggctcactgcagcatcgacctccctgggttcatgtagatcctcccacctcagcctcctgagtagctgggaatacaggtgctcagtgccacaacagcctagtttttgtatttttttgtagagatggagttttaccacgttgcccaggctgatctcaaactcctgtgctcaagtgatctgcccccttggcctcttaaagtcctgggattaccgatattagccactgtgcccagcctgtctttaagagtatgattaccccctcagaattaaataaataaataaataaattgctgttttcctccttctagaagcctcattttcagctctttaaattgtcttcgttattcttttcagttaggatctaattgggatctgttggttatacatagaaagtgtaaaaatgacttactacttcccatctgtaacagccctgttgtgtgaacaatgtcactaagcagcagtttactgtcagctggtgatctattgtgacccttagtacatttacgcatttcctaatttcttttcttgatttgtttttattcagttttttgttggacagctttctattattttatggtttctgctttattactctgatattgaggacccttttctaaatcacatctaaataatagttttctttattgccatttctcttgtcttgtgtctgtgtcttgtattctaatcagacatgccatcgattactcatcttcagaagacacttctttggtcatgcgttctctttcttaagattccttcttacctattaaagaccacactctgcattctgacattcataatttttcaaaattcatatagttgagcatcgtctttgttctgagcatgcatctaaatgatgagaattcagagagctagacagggactcggtttttcttgatagagaaactgctatcagtatacgagacattattgtagatgttgaatcaaaacagtgcccaggcattaggttccctaggaattccaaggaatcgataatgggtaatttttctggggatggaatgatttttcaggttggagtgggacttgtactgtgctttgaaaacaaggattgaatattagtgaaggaggtgacatttccctggcctcatgtttccagcctgagggaccacaatgggaaaaagagtggcttatctgattggtgaatttgtaagaaggagatcctcagctcggcactgcagggcctctctgttcagagctggttctgtactacagccttttctgccttgtgttaacagacctggccttgctggcgtggcttgagtttgtctagctgtgccagtgactggctggggaggtctggctaattcttgtcactgatctttagccattttccctagtcagcttttatcagtaataaaagtaatgtcttgattcccagttctcttagtggaatgtgagtgtgggcagaaaggcaaggtgggtggagtcataggcattaaataccgaggacatgaacaccaaggagatgagcaccgttgcttagtgtcgtgagcaatgagagagaaagttggaataggagactggagtcagatgtgcagagctagagtgtgagctttattttgtaggctgaggacccgctgaaggttttaaaatgctgtaaagtgtacagcgggttattttggtagtatgaatccagtagtgctggagaatggattccccagggctttttcagttggaattcatgcatcttctggctttggatgttcggaagggagatggatatgaaacaccctgaaatgatatgtaagatatattaaagggatcgtctttcagaaagggattaagaacctccacttaagctggacgtggtggctcacgcccgtaatcccagcactttgggaggccgagtcgggcgggtcacttgaggtcaggagtttgagaccagcctggccaacgtggtgaaatgccgtctctactaaaaatacaaaaattagctgagcgtgatgatgtgtgcctgtagtcccagatacttgggaggctgaggcagaagaatcacttgaacccaagaggtgcaggttgcagtgagccaagatcacaccgttgcactccaccctgggcaacagaacaagactccgtctcaaaagaaaaaaaaaaaaaacaccacttaactcctctgtatcctgtttgtatataggacttattggaacaaaatttcaccattaagtatgatgtttattctggattttttaaaatagtgctttaagcagatttgtagaagttctttgtatacctagtttgctaaggttatttttaaaataataaattgacattcacatttattgcatataattttatgcatgtattctgctaaccatatgggtttttctttttcatctatcagtgtggtaaattatattgattgagttctaaaattaaaacagcttggcattcttaggataaagccaagttggtcatgatagattatctttttgatgttgaattaactttgctaatatcttaagatttttgcatttaatcttgctagcttgacctgcatttttcattgtaaatgttttctgtaattccttgagtgctcagaaagaatctatgtcctgggaacccaaaagtaaataaatagatattcccccaaaagaaagtaaacaaaaaagggaaatagtaatacatgtgtatgataaataaataaaacaaaagggcaggagctataaaacaaaggcctttctctaacctcagaaacccagttcccctaagacaatctctgttaacagagggtagcctgtgtgtttgtgtgcatacataattatgtagatgatacattatatgcatacattattatatatgtaacagtatatcttggcggtagtttcagtgtagcacacaaggtttttctcattcttttttaatatctaccttatattttattatatttttgtatattagccaggcccttgatgacatttaagttctcatattttgctgaaatgaacatcattgtaccttcctctttggtatgtgtctgtggaataaattattaagagttgagttgctggataaaagggcatatgtgtttcaaattgtggtagcaatagcttaattatcttcgaaaaaggttatacctccttacactctaacagtgtatgagcgtgctgtggcaaatatctgaagtgttctggccaagactcatttcccacagcccaggtcatttgaagtctcagtcatgctagctgcaccacacttcaccccacccacaagtgcattcattattaacttggtgatctcatgagctttggcaagcagtggcttcctgctagagagcctcataagaacctcggaaactgctgtgttctagatgagcaggatctgagaggatgttggcaaaatgcccagacataaggtactgaggccgttctgcctaccttattcctgagtctttttttacagccctccctgtctaggctgtaatggaataggtgaaagaattgtagcaaatgctggccatcttctgtcagcattccaatgctagtgactggagggaacagagatggatgagatgtggaattagctgttgggcccgtggattctgtctagggtgttcttacctttcactgtttgcctgagttgaagtcattgctcacattgtacagtcactgttgtttcctgtgtggttgtttattctttttttttttttttgagacggagtcttgttctgttaccaggctagagtgcagtgacgtgatctccgctcaccataacctccgcctccctggttcaagtgattctcctgcctcagcctcccgagtagctgggactacaggcgcgcgccaccatgcccagctaatttttgtatttttggtagagatggggtttcactgtgttggccaggatggtctcaatctctttgaccttgtgatccgcccaccttggcctcccagagtgttggaattagaggtgaaagccaccatgcccagccgattgtttactcttaaatccaggtgtgttgaggtgatagatgccccaagaattggcagtcactgcttactgaataagtagttaagatttcatcttgggagaggagaagtgatgggggcatgtaactcttggttatccctatgttatttttataaacaggatccccaactggagtcctggttgccaccagaaacagtgagaaagcaacacccaggagccttggggtgtggcctcagctgatgaggtcagaggagattaggggtagggaggccaggaaaagccaaaccatggatcctttgttaattgtcccttctgttattaacaatcatttttaagctagagagggatatatgtaaagcactgaaactttgctaaaatagcctcaaggttgtgtgctatatttaccaaaactgagaaaatattaaagtgacaaaaacaaaacaaaataagtggtcctctaagcaagactcggttggtaatgtatataaagatttttattaatctgattcttttaaggtgattaggtctcccttgctcagaaaccttcatcacacccctttccttaaattgactaccaactaaatatactctaaactcttgagcctgacattggaaactttttagagagaatctgcctctccagtgtaatcatctactttcttatgatttgcagtgaagttcatggaccagcagcatcaccatcacctgggatcttgttagaaatgcagactgtcaggccccaccccagacctgctggatcagaaccagagttttagcgggataccagtgttgtgcatgcccaccccagtttgagaagccctgatctcttatacttcattctcctcagccttccttcatgtgatacaatctgctgaacgggcctagctctcattttctaagcgtgttttacacttctccagtgatctgcctttccttaaatcatacagcttcctcagaaaagtctttttctttcagcttccttcttccttccattcattcagttgattaggggtctaaaatataggccgggcatggtggctcacttctgtaatcccagcactttgggaggctgaggcaggtggatcacctgaggtcaggggttcgagactagcctggccaacatggtgaaactcattgtctactgaaaatacaaaaattagccgaggcagtgtcatgtgcctgtagtcctagcaacttgggatgctgaggctggagaatcacttgaacccgggaggcggaggttgaagtgagccaagttcgcaccactacactccagcctgggcaacagaatgagactccgtcttaaaaataaaataaataaataaataaataaaatatgctaagaacgatgatttggcttgagattcagacatgactgaaaacacagtccctgtccactcctgggacagcctctctggaggacagctcagcaacgtgtatcaagagtattgaatatgcatttcctttgatctcaatgttgtctcctctaggagattttcataaacgaataatcagaaaagaatgtaaagaaatgtgtagaaggttgattgttgcaacactataatagtaaaaaattgataaatgaataattgttatgcataaacttttatatagccaagaaagtaatatatatgtaaccaaaatgaaaatatatcaacattaacaattatattattaaaatagacaaagacaggccctgtggtgtgcctatagtcccagctactcaggaggctgaggagggaggatcccttgagtcctggagttcaaggctgcagtgaactatgatcgtgccactgcattccagcctgggtgacagagtgagaccctgtctctaaaaacacaaaagagacgtcatgtatatcaggtgtctagtgtggtgctgccccttcagatagattccagaatgaaggagatgccgggggaatcttcttcagcctacccacacctggagcagagccacagttggccctcaagcagccacaacatctgagcaagaaataaaccttcactttaagccactaacatttgaaggtgatttgctactgccacaactaatctagtgaaagctgactagcacattgtgtactctgcttatttgactccctcgttgtctgcctgcaccttgatgttatctctttttttggcgtctgtccatcctaacgtgacgtcacttacaaagttgatgcagttcattgaacttgggatgagggtggaaagattaatgttgtaattcccttggattagagcagtgtttctcagtgtgtggtccttgaaccgtctgtatcagaatcctgtggggtttggcagggatacagaatcttgagcccccactgcaggcctgcgaaaacagaatatttggggtgaggtttcaaggaattctcagatatacccaagtttaggaaacactggacttgaagctagacaaatactacatcaggatgttactttgtgcatcccctccaccactgaaattggaatatgatagacagtgtcccttggtattcttctccgaccagaactcttttttgtgatggatggatggatggatggatggatggttgattgcttctagattagggaactaaacattggtcatctttatgagaaaattttagccagatttgattcaagaactacataacacttgacaagtaaaatgaatgagtacctcaactgatatactttttccatactactctttttttttcttataaaaattaaattttagttacataattaattcatgagtacattctcatagaaatttaaagcattactgatgaggtcaaattcagcattgaacccctccccaaatcttgggcccctcatatccactgtgccacaggtatcttggttttttattttttccagatttttttctatgcatgtttatgtgccgtgttaatatttatggctaatacagatggtccttaagatggttcgacttaagatatttttcaacttatgatggggatgtagccacatcataagttgaggagcaagtgtatacattaaatggcctgtaccaatacagctggtatccattctcactgagcaagcatctgctgaaattgctcagagccctgtgtcactgtttgatatcttgagtatcaaccctgcagtttgtacttgtactatgtatgtgtgtgaggagtgtatacatatatatgtatatatgtgtgtcttaagtgtcatactacacatatttttttcagtttgttttttatatatgttggcatacatccatgtcagtatatgcgagtttacctcatgttaaaaaattgctccactgtattccatcctatcgtttatttagccatttcttttcttttcttttcttttttgagatggagtcttgctgtcacccaggctggagtgcagtggtgccatctcaactctctgcagcctctgcctcgtgggttcaagcaattctcctgcctcagcctcccgagtagctgggattacagatgcctgccaccacgcccagctaatttttgtaattttagtagagatggggttttaacatgttggccaggctggtcttgaactcctgacctctggtaatccacccaccttggcctcccaaagtgctgggattacaggcgtgagccaccacacccggcctatttagccatttgtatattgatggacagattgtttctagcttttgctattacaaacagtgctgccattgatatatttatatgtgttgccttgagtatctgttcaaatgtttgtaaaccatatgtatgtacatacacacacacacacacaacatacacacacatatggagagagacagatatatatgaacatgccgcgtcaccattaatttataccccaaccaggagtttatcagtttcctcatagcctttcaaaattgattgtcagtctttttgatcattgccactattgtgggtaaaaactggtgactttgttttaacctgtgtttcactgatcattaggaaggttgaagatcatttaatgtgtattcgccatttgtatttctgtttcttaaatggtctgtttttatcttctgcctgtttttctgctgggttattgatgtgttggagtttgttatatattagatatttaaatatatgttgcagatgtttactcacagttgatacatgtcttttatctttgcttatgttgtcttttatcatttgtttttactgtcagacctgtggtggtcattctcgattttatgtagtacctgctggccatcacctcgtctcctcaataagttgtttggattcttacaagaattagaaaaataactaaatgtctccaaattgtccatatgtaagagcttcgaagggctctcctgaataaagtgtatttaattgcatggacttgtaaacatgtatgctttggccactctgaaaatctgctttctatattccaaatatgtttgctggattattgtgctctaaataatggaactgttattctaacagtcctataatttgtatatttaattcatttgttcttgttcacaagatgatttgttatcagtctctcacagcacaattagggatttgtaatcagagtcacatcagtagtctttgtaaattgatgtaagctgttaaccgcgttgaaccagattttactatcatgtgtatcaataaaatgtataggtgatctctgactttcacatgtgaatcccaaaagtttacttaaaatttaattatttggagctctgttatttttccccagaaacaagtccgtttttaggtctctggcaagctcaaacaagcattcttaaagttaacagtttatcacattatttttatgttccaattatggatgtaaagatagaaagaataagcctataatcttcagaagttctggagatcattgaccgtggagtaggcatgtgggtaggggaggagtaggatgtagacgtctttaaaactatgaaattgaggacacctcttggtgaatcatttattctccagtgttctgtatttaagaacaaaggtgactggcatccacccattattctttagttcatgcattgtctgttgaaaatgcagtatttgtgagactgaatcagtcttatgtagcaaggaacatttcccagttttttgtttgtttgtttgtttgtttttcttttttgagacagagttttgctcttgttgcccaggctggggtgcactggtgtgatctgggctcactgcaacctccgcttcccaggttcaaatgattcttctgcctcaggattacaggcacccaccaccacaccagctaattttttgtatttttagtggaggaggggtttcaccatgtttggcaggttggtctcgaactcctgacctcaggtgatccacctgcctcggcctcccaaagtgctgggattacaggtgtgagccactgtgcctggcccatttcccagtattatattccttgattgtttgggtccaaaagcaacttcatggctaattattttcactaattgcacaaatttgaagccattgataaaagcaactaacaatgttaacatcagttgtaaaataccctcaagaagccagaaatcctaacttgtcagtgcatttttccaggtactttgtggttgtggtttgtgttgtaggaatggtggctgtggccctagaggattgggttttgttccttgctttccactgccctgctgttccgtggtcctttttggtttgttttttgttttcttgagacagggtcttgctctgtcacccaggctgaagtgcggtggtgtgatcatacctcactgtagcctttaattcatggactcaagcgattctccctgctcagccccctgagtagcagggactacaggttacaggcatgtgccaccacacctggctattttttaaattttttgtggagatggtgtctcactatgttgcccaggctggtcttgaactcctgggctcaagcaaccttcccaccacggcctcccaaagtgctgggatcgtaggtatgagccaccatgcccttttctttttgagggctctgttgtatactcatatagttccagaatgaatattcctcaaacatcagcatgcctaagaatcacatggaggagtcaagtcaaaatgcaggttctgcagctccattcctaagaatctgattcaatctagcaatcagcagtttatccacaagcaccccaggtaacccattgcagctcggccctagagcaacagaaatactgtgtctcctgtgttggctttctcaagtgcatgacacaggacagttcttggatcacttgcgtgtgtgggtgaggccgataaactcttgtcaaggcaccagggaacaacctgatgttccccgagaggtcagtgaccaaatgggtcgtggaattttatattatgtatatataaatatatgaattataaattgataagttatagttgtatatatttatggggtacaaagtgatgttatgaagtgaaaaggaaataagctgggcataaaagggcaaatactgcatgttctcacttgtatgtgggctctaaaacagttgaactgatagaaacagaaagcggaatagtggttaccagaggctggggtaggggaaatcgggagatgatggccagagggtgcaaagcctcagttggacaagaggaatacgttgtttctttttgcttgtttgtttcttttttgagctctattgcagagcaccttgaatataattttaataatggtgtattatacatttcaaaatcactgagagtaaatttcaaatgttgctaccacaaaatacaaaaagtatttgaggtgatggatgtgttaagggaaaagtaacagagttcctcaaaaaaactaataaaataaccacttttaatatgcttctgtaaacaattcctttctgagaagtttattccttttggctttcaacgaatagtttgtgtctttgaatattcattacaaataaatagtttgtttctttataaaagttaaaaaggtataatgggaactttttcatattgcaggtagtatgagtatcgtgacaaagctatagtttaaataggtgctattgggcacctattgactgccctcagaacctccctgaagctgggatgtaagaatttcgcagtggaaagtcaggcagttgatgcatcttgtcttgtcatgacattttgaagaatgactttactggtaattgacaggagtattaagcacccatataatgtattttacttttctatatcattttaaattaaaatttaaaatatgatgaaaaaatttatcaagacgagagatagtgttattcgtctgagaactgatgtgaaattttttgctaaatttatattttcaggaccttatgctctctttggtgcccctctttaccttgtccttacagacatgtgttttgtagatgctctgagctcagtttatggacagttcttcataatattcatttattaacagccagggatgaaatgcttggtatgatctggtcacgatttatgtcctatacacagaaccaaaagctttccactgagtgacctgacttcagattttctttgtgatatgaagctcatgatcatttgcttggagatatttacctttaatgaaatttaagtgggacatgtatttcttacagaaattaatgcaatgattatattattttaaatatttcgtgtgttattttagtgtaaatcacaacatggatttcatgagtttcagaatgtttatatttgcctaggagattattttttttctgcatgcatgtaggttgggtaaatgattaatactgtgtaagtagaaaataacattgatttaatttgtttgatcactggtttaactccttggaagagaagaaaactataaatatatatatatatatatatatatatatatatattttttttttttttttttttttttgagacagagtctcgatctgtagcccaggctggagtgcagtggcacaatctcggctcactgcaagctctgtctcctgggttcacgccattctcctgcctcagcctcccgagtagctgggactacaggggcccgccaccacgcccggctaattttttgtatttttagtagagacggggtttcaccgtgtataactatattcttatcttaatcaagagcaatcttttgcctgtcttatttgtaaggtgcagttctaggtattacatgtttcacttaaatacacagttgccaccaagaggtcacttttaagttaagggaactagagatatagcaaactaaggtgagaagacacttacttctcatgattcccaccttaaaatcacatttagcacctgtttttctctttgtcaaagtgacaaattatgttttttaaaaatatagagtggatttcactttgtttcagaagttattggaacttctgaaatgaccaaagataccatgatatttgcaaagcagatttaggtgactaaggctgatgcttatgcaatttctttgtaggacttcttcctaaccttttccaaggtttcaaggcttttttgaggtttcctagtttataaggattcaggaaaaatatttattgaacacttcgtgtgagcctgtagtctctgctttgcatagtacttgttttgattgttctcagtacctgacccacctccatttttttgagaaagaagtagaggagcatttatgaatgttatttattcagtctggttgatttcctcatagggatcctgattatgctgggctgacttttaaagttctgtgtagttttcagcttttcctcatgtgacccgacttaaatccccaagtgctctcccaacgtggagagctccatcctcctgttaagaatccagagtctgtagccagtaagatgtgttcaaaggtttaacaatgtttttattttttaaatgcaaatatttatactatctgcttcatttgtgaattttaaacattatcagaagcacacaggtccagaacctgaggaaggcaaaaaaggtcaggaataggtaggggaaaaggcgagatgaagtcttgaatcactaggtttattgtttgctgtccaagtccgcccgtcttctcagtctgtcattactgattatgagatggtggcaaaggcggaggatatgctgtgaactcataatagtcggttgttaattttcttcaaattctttcattgaaggtctccagctctttagttactgctgtgttagtgaaggagttgtgaagaagacttgatccctctatcctactttagttttatgggaggctttattacaaatgaatgtgtaccgtcctagctttctagctcccagctttctatgtcacacttcaaaaaaaataaagcagctaccaccattggtaagaagccctcgggtattatgaattcagaaccttgcccaggccaggcacggttcctagaagggggatagaatcttcccatctggttaaaagacaacgaaaatgggtccaacatgaaggttaccaaaggaagattcatttgaacctgttaaaggcatgctttcttgtcctttcctctgccttcacatgtgtgtcgatggaagccagctcgtgccactgcggctctgctctgggccccccgccaccccatatggccgccgctccctgaccccttgcctggaggagcagcagaaccccggcttccccttgtcccaggggagcgtctttcacactggaaatggacagagtgaagagagcagctggtgggaaaatgagaatggacctccaggggcttttaacaaggccatgaattcagttattggtcttgtgctcacacaattaaaaacaagctggcagcggggctgcatgatgactgggtgaggaccgaggcttgctttttgccgacgtcttctccctaagctggtggtccatttcctgctttgccctttggtttccatgctgtttctaaccttcacaaattaaagatggggcctttcagctacctggtttgtttcctggctgttttgtccgtgaagctctctactcttgagaggcattctgtcccagttttacttttttacttgatgttgttactgacttttggaatatctatccagttagtctgtgaggggacgagggactggttgtagggcatacgtgagccatcccctttggcccaagcacgagcatcttccccatttgtttatgtgcaggtgtatgtcaaatatatatttatattttattatttaattttattttataatatattttatttattttattttatttatttttattttttgagatggagtcttgctctgttgcgcaggctggagtgcagtggcacaatctcagctcactgcaaccttcgtctcccaggttcaagcaattctcctgtcccaacctcccaagtatctgggattaccggcactccccccagcacctagctaacttttgtattttttttttagtagagatggggtttcaccatattggtcaggcttgtcttgaactcctgacctcaggtgatccacccacctcggcctcccaaaatgctaggattacaggcgtgagccaccgtgcctggaaaattttatttattttattatttaatgttattatttgttgaaacaaggtgttgttccatgcccaggctggagtgcagtggcacaatcatagctcactacagcctcaaccttctggactcaagtgattctcctccctcacgctcctgagtagtagggactatgggtgcatgacactctgcctggctgatttttttattttttatttttttggacaggggtctggctgtattgcacaggctagtctccaactcctggcctcaggcaatcctctcagtttgacctcccaaaccattgagattacagcatgagccaccgcacctggcctcaaatatatttttaaaggaaaaaaatgctacacatgctaggacttgaatcttcctctttattgccagataaactgagggaatggatagttttctttgtttttcagcaataaaaaatttttaattatagtggaaagtcttaattatagagggagagcaaagtgtatttggatgatctgtgctaaaaaggaacagtacaggtggagtaacaagttacatgttagtcttgtgattatctcattaatgactcatttgtacttgaaagcagcataaatacatttatggaaaaatatgaatgtgaacttatttattaattttttttggagatggagtctcactctttcgcccaggctggagtgcatggcgcgatctcggctcacggcagcctccacttcccgggttcaagcgattctcctgtctcagcctcctgagagctgggattacaagtgtgcaccactgcacctggctaatttttgtatttttgtagagatggggtttcaccatgttgaccaggctggtctcaaactcctgacctcaagtaatccgcccacctgggcctcccaaagtgctgggattacaggtgtgagccaccacgcccagctgacttatggttttttattagataaggtagatgtagagataatgtagatataaagtgtgtatttgtgtatatttctgtttatctgtattggtttcctatagctgctggaagaaagtatcacaaacttggtggcttaaagcaacagagatttattctcttcaagttttggagactagaagtcggaaaggagtcttaggggctaaaatcaaggtgccagaggataatctgtttctttgccatttctagactctagagctacatttcttgcattccttggctcacagccccttcctccatcttcaaagccagtgttgtagtatcttatctctggctctacttttctatgcttctgtctcatgactttcttctcttctgcctcataatctttcttttcttccctcttataaggatacatgtgatgtcatttagggttcacttggctaatccaagatagccctcccatgcccagaaatttaatttaatcacattttcaaaggctatgccatgtaaggtgacattcacaggttccagagattagaatgtagacattttgtgggggaggacctttatttagtctaccacagtgagtgtgaatgtgtgtgtgtacgtatgtgtgtgtgtgtgtgtctgtctgaaattccctagctgacctataagcagctactctccaataacagtaagcacagctagtgttgaggtcttagatctaaagaatatttttcatcgaaaggaaccagttttgttttaaaataaaatggctcattctagggcagatggaaaatataagagaagcatggaacattctgtggcgtgagaaagtaaataaatgctcagagaataatggggacaggtcaaaagacacagaagccaacttgaagaggcttctgtcagtcccaactgggcaatttgagcactgaaataaaaaagcaataaattcagcctgttctgataaaaataaataaaattataaattgaaagtttggtgtgaaacaagatatttacatagttcctaagtgcctttccacagcgtaataattcgttactaagagaaaaagtttaagctgacttaaactttatttatttatttatttatttatttatttatttatttatttatttattttgagatggagtctcactctgtcgcccaggctggagtgcagtggctcaatcttggctcactgcagcctccacctcctgggttcaagtgattctcctcgctcagcctcccaagtagctgggattacaggcatgcaccacaacacctggctaatttttgtatttttattagagatgggggtttcaccatgttggccaggctggtctcaaactcctgacctccggtcatctgcccgccttggcctcccaaagtgctgggattgcaggcgtgagccaccatgcctggctggcttaaactttttaagtcaacttaaaaaggtttctcagtggtgaaacctggcagatcaaagtgaatgtgatctgtaattggacaaagtgaaagcatgtgccactgatagggtgcaaagagaagaacagcctcatgaaacatgaagataagcccaagttgaagaacattctgtaaaataactggcctgaaactttcaaaaccatcatagtcatgaaagttaaggagtataatgtgatatagtagtggggtggtaatagccacgtggaagctctaagcttcactgtaggaggatctggttaagttatttactaatagagtcgtgacttaattttgtaggttttccttcttggtctagctgcattcctcagtgaaaactcttccggtctcctgcttgcatggtgaagtatagggtgccataatttcattagcttggtgagtgaagaaatctaagcatcttaacatccagcatacaaatcccagtttccgctatggtatctttaacttcagtagtgtgtggtgtcccctaggccagagtgctctttgaaaaatctctctagttaataaaactattgttttacctgagtaggggaggggctgtctcccagtgtagtggaggcagggatctgaggacttaagtgcttgataaccattccttgtgaatagtcctctgttatctaagccactcccttttccttcacttcaagagtttaccaggctccctcattcccttgtcctttggatgtcttgtggggtgcattgaattgttcttttccttctccaggttttcctgtggtctcctgtgtcagttatcactagatcatttgcttcaaaaatgtcatttttcttattctatttcctgtgggtttgtgcttttataagaagaatctctttactgtgcttttagtagctttggatgagggcaaatgcaaatgtgtatatttattttgccatcttacccagaaataaacaacagtgattttttaaaactttttctttttcctttttacactggacgtctcccttccccataaacctgttatagaacttgaatctttaaaacagaaatggaactactgtggttgcaaaagtggtgtggggttgagtgaacaagagtctttttcaccatgcctcctttgttgatctttgcagccaccctgtctctatacccaggcagcttctttgaatcttaggattctcatgtacacagctgggaaaaccactggattagagtattatacatcgctgtttttggctagagtgaaagattcacctccttttacaactttgcatgtcttcaaacccacattcctcctgtgtgggctggtgcaaggatataccttctcatccagacccttttgcttattaaaagggaatagcaggggcttgttacctgtcatcctggagaattttccttttgccctctaatctgtagcctttcctaaagtaatagttaactaggctgctgtaataaagtaccataaacagggcactgaaacaacagaaattaattttcttacagttctagagagtagaaattcgagatcaaagttggaagggttgctttcttctgaggcctctctctttgtcttgcagatggccaccttctccctgtgtcttcacatggtcttttctcagtgtgtgcctgtcgtcatcttttcatatgaagacattagtcatgttaagttaggacacactctactgatttcattttaacctaattatctctttaaagaccttatctccaaatacagttacatttgaggtactgggggttaggacttcaacatataaatcttggggggacacaattcagcccataacgcctaactgttgccttttgcagcattagccttgagcttcttgtccctgtctgcacttaagttgtgcgtggctccctgcttccatgggcctggcttctgctgggcaatgggagcagataggattgagcaggatcaagtgcagagtgtgactgttggaaccaagtgttagttttgagtgagtcatgaaatattattttatagtctttaatttagtgtttaattttttctttataatactcactggctgacttggaggctttcagattctctgaaaatcatactgaagttgaaataattaaggaaatgaaggagcatgccacctttctcaaactctactcttaacctttttctccctcctcactcctctagccccatcattcccttcccaaatcaactgaaaaccacttttacttctaaaatttgcctgtagctttctgcttcgtctttttgatttttttacagctaaacaattaattaaaagaatcattctaggctgggtgtggcagctcacacctgttgtaatcccagcactttgggaggccgaggcgggcggatcacctgaggtcaggagtttgagactagcctggccagcatggtgaaaccctgtctctactaaaaatacaaaaattagccaggcatggtgatgcgtgcttgtaatcccagctactctggaggctgaggcaggagaatcacttgaacccgggaggcggaggttgcagtgagccaagattgtaccattgcactccagcctgggtgacagagtgagaatctgtcatctcaaaaaaaaaaaaaaaaaaaaaagtcattctacatcagtagtgcttatcttgtgtctaaaattggtaattataatcggtaatgttgcgagttggataacgtgaatgtaattctttgtaaatgtgaaaagtcatatcaaatgtaaggttgagattttgtttgtcccatccatttaatggtgggcttgcatctttaaatacagggtgtgttttggggatcatgccattgtaattttatcacaaggaaaagatgttactgctcccgtagtgaagtgtctgtgaagctggttcagaagtgtgaagaatcattgtgcttcagaattcaaggagagctgagagataaatttgagtaacactttttatcaatagggaagctgaagcccaaacttgaagcatttgtgtgagactgcgtggtactatcgagccgagatttaagtctgatcacctgaccatcagtccagctgctaatgtttcatgttccatacttcttaaggagatttatgttcgtaaaaacaactgtgatgaagcaaaagaatatattttattcagttagtaatgccaaaggaaatagtagtctgaattctgtgggtctgtcattaatctgattgttttaacaatacagttttcaaagacctgcattaattattggagagatcagtaaaaatttataagccttgctatgggaagaggatgtatcaataggggctcacagcttcaagaataactaattgtttggtaagaataaccccccagtgcaggtggagctgagaaaccaaaggagaaggcagacaggtccagactgttgttatagggtgttttattggggaactgacagacagaagcgtggtttttggcaactgcaagacggatagatctccatgccattataccccagacccagggattatatctagggaaggggcacacatgcttcggagggaataggtaggaatttgatgtaagggcaggatttactgtaagtatgtgccattactcaagaaacagtagataaattggaaatctcagaggcattcccagaactggggttaatcagaagtcaacatggcatgttagtttccaagatagagttactttagcctccacacaaatgcaagcagaatgaattttatattatttagcaaggtggagtatgttaatggagcactttattaagcagagccctttagtgaattttacttctaggtcgagcagtcccttttaaaaaatgtttcacttttgtgatagtctgagcgtactttgaacacggcttcattcggaagctttagcgccttcaagccttgctcctcaaagctggtctgtggatcatggtcaccagggaacttttaggaatgcggagtcccaggccccaccttaacctgctcagtttctgttttaagaagattccaggtgattcgtatatacaacagagtacgaagaccattggtcgagagcagtggttcacaaagaagatggctcctgtaccagcaacatcagcatcacctgaaaaattgttagaaaatgcagattcgcaggccccacagacctacggcatcagaaactctgggatggaccccagcagtacgtgttttacttggtgctgtaggtaatgctaattcatgataaattttgagaaccactctagggtagtatgtttccaacagtttaggtcatgagcaaccttgagaaatacacttttaatcatgactcagcacacacactcacatgcacgtgtgacttagacgttccatgaaacaatgcttatcttacagtgtgttttctgctctggtatttttacttatattctattaaatagatatgtgtgtataaacttattgatataaaaatgtggtcatgatccactaaagtgattttacaagccactaatgggtcataagttgcaatttgagaaacaatagtcttgagcaggctcctcttgatagtctgataaaattctagatcttttgtcagaatagtgcattttaaatgcatacaataatgtagatagagttgcaaaagaaaccaatttgattggctaccaaaatattacatttgtggtatgataatatatgtatcccaacttctcaggaggcttaggcaagaggattgcttgaggtcaagagtttgagtccagtcagagcaacatatctagatcccatctctaaaaaaaaaaaaaaagctatgtttctttattgataacaagatttaatggtgagtctagtaactattatcatttcaaactagggacgagtatacatatttccaaatatctgtagtaactgttagatgatatgaaaatgatgaatttctattgatgacaagttatggttattgctaccaatactctggtttgttgcttacatttgtatttgaaaacatgctaaatttcatctaaaggtaaatgcaaataaatatgtaaatcaccccctccccagcttcatgaacttccagaattctcttgattggcaattgcttccccacggacctgaggttaagaatccttgctcaaggggaaccttgctttagagaacagttctcggccttaaagttgagattctaagcaaaaatttatcttcttggaatttcttgaaacttttgctgtatagatggcatcttttcttattttctagcacccctgtaatggattcctttttaaaaatgttctttctgatgttttagtgagtccttggggcatcacttggaagccccagtgtaggctcttgatactgtttcttctctagtctccccattctcaatacatgcacctggttgttcaagccagattcctgggagtcatccgcaatgccacgagttctagatttggactgctcgggtgtgaatctaggatctatatatctttggaaaagttatttagcctctcattgccttcttttttccacctataagatggggatgacagtagcccccacctcataggattgttctgagcattaaatgagatattccatgtattacattagaacagtgcctggcacagagtaagtggttagtatctattctaattaaccttaatctcccctttccctcttttttttttttttttttgtttgagacggattttcgcttttgtcgcctaggctggagtgcaatagcgccatcgcggttcactgcaacctccacgtcccaggttcaagcgattctcctgccttagcttcctgagtagctgggatcacaggtgcatggctccacgcctggccaatttttgtattttttagtagagacggggttttgccatgttggccaggctggtctcgaactcctgacctcaagtggtgcgcccaccccagcctcccagagtgctaagattaaaggcatgagccactgtgcctggcccctttccctcattctttaaatccagtttatcagaaaactgtgtaattcttcctacaaaatatattttaattcatccacttttgcctattcctccaaacttccctgttctcgtttggatttctagctgatatctctgctgcttcttgtctcactccaattcattttccatataacacccatatgatcttttaaaagtgtaaatgaataatcttttaaaatgcaaatgaatcactgtatcccataaaacgcttcagtggcttcccatcaaacccatcaaaatgctccgtcctttccttgagctacactcttcatcctgcaaatctctaaacttgcccactcacttgctcttctgtggccactttggctttctcttagttatctgagtagcctcatccatccttccattccttaaggccatgcgtatggccttcccgccaatatgtcgctgaccttccccagcctgtcatatttctcatctctgcaggcgttagtttctcagagagctttccctaaccacctgcccaaattagggcaccttacgtggcagccccttggccgagttcctcttttactagcctgaagctccccaaacacttcaaaaaattaatatttcctctctattggggaaaaggataattaacaacctgtgattatcaaacacgtaacaccaagaggagtatgcaccttttttcagaccgatacatttgacgcgttatgaacattaagtgattgtggagctcttttaagaaattgctgtctgaatgttgtgcacgctagctcttggtattaaagaacaaagtggggtctgccccctgaacctgtctccagtggggtgatggaggtgtgattgggtcttcctagtattgtcagtcatttctactccaaagcatagaatagaaatactaacatttccctctttgaaatagttacttcgttgctgttaaaacccttcacgcttctctcccccaaagtgaatggtcagtcactgttcagacatgagaaaagatgatgtctcataaccagtgggtagaaaccagtaccggtgatatctgtatcctggttaatgtttaggttcatagtaaagaggcaaaagaaggcgtccctgactgtgctaggtcaaatttctttgtgtcttgaaatttttttccttgctacttgtttttaattagtcctcagccggagaacagagacactcctgatttttgacagttgcctaaaacagcgaggaaggaggtcttaggagttcagagttaggatgtaccactttcaccatcacctttgtagttcttgtttcaaataagggaatttaggagttacacaggaccctgggacagatgttgaaatgtaggacaatcagtataaatgggatgcctggcagttctgttccatgccctgttcggctgaatggtgttcctgattatataaaaatgtgatctattttggggaaagactggtttttttgttggtgtactttaacagaagccacacaaagaaatattcttgttatggactgtgggtgatgataatcagttggaaaatgatgtgtttaaaaacaaaatacagttttcttttttttttttttgagatggagtctagctctgtcacccaggctggagtgcagtggcacgatcttggctcactgcagcctctgcctccctggttcaagtgattctcttgcctcagcctccagagtagctgagattacaggaaccaccacacctggctaatttttgtatttgtagtagagatggggtttcaccatgtaggtcaggctggtctcgaactcctgacatcgtgatccacctgctttggcctcccaaagtgctgagattacaggtgtgagctaccgcgtccagccaaaatatagttttctaattgcagaaaagttacattaagttaattttttaaaaaccgaccataattcagcctcccaatcaagccatcctttttattttcctctgacttccctatagatgtttatatgtatacattttttatatagctataatcatgcagtgatagtttgtattctgattcttttcatgttacacttttcatgtttcattttgaatggttagatagctttgagtacatatgtcataattattttaccaatctcatgttggataatttgttttatgatgtgttttttaatgatgtattttaaatgtgtctttgttttgttcttattttgcaggcagagacatttgtttgggtgaacaatgcatctgcacattcccagagtgttgccaaggccaaatatgaatttttatttggcagatctgaagggaaagctccagatactagtaagtatttcctcatatccctctcccaggtaaactatatgaagagctgtgatttcaaagtgatttttctccacctgcattactttcttcttccctctgtgaaacctgctttccctaattattcatcaaaacaatcttcccaagatgtagaatccgcaaatatttcatgtaattcttgtggcctattcttggtaatttcaagtcatgttcttggtttgaagaattctcagcttctgatatttgaaattccaagaattaaccagttttcataagagttttccatagttaccattgttatatatattgactaatgtatttttggtggtttttttttttttgagacaaagtcttgctctgtcatccaagctggcatgcagtggcatcatcctagcttactgcagccttgacctccaggctcaaatgatccttctgcctcagcctcccaactagctgggactacaggcatatgccaccacacctgactaattaaaaaaatactttttttcttttttttttttttttaagagacagggtctggctatgctacctaggctggtctcaaactcctggcctcaagccatcctcctgcctcggccccacaaaacactgagtttacagatgtgagccactgtgcccagcccttggtgcttgtttttcactaacaaaatatattattaggaaacatttccacaatgattttcagccactgcagtctttactttggaggttattgtagctcttgtttatttttaatactttttagtattggcctaatctagttatcaaatttagtcttctggaactagaagcaacatttttcactttgaaacaggtaaatttagaacaaatagaactattactagtgctaattacagtaataattaacctactagattacttactgtgtggtgaggcactatgctaatcatcacaatcaccttataagttggtaccgttatccccattttccagatgagggatctgaagtaatcttctcccagtcacaatcactcacacagcagagccaggagtataaggcaagtttgcctgaccgcagagctcatcctgttaatgcaatacttttttgaaggcattttcctagaaggaggtacaagataaaaatgcaaatagctttgtattgaatttcaaaacgtgtaattttatggaaaaccgatgataaaggggatattagcatatcttgagaattagattggaaaaggctattgcatgtggttaatattctctgagttctggatctagacttcttgagtttgaacctggccttgaacttataaactgtgtgaccttgcaaagctatccaacttatttgcggctcagttttctcatctgtaaaatgggattatagtgacttatgtcttagaattattttgagaatgaaataagttgacatttataaagatcttagagtcatgtcccatctctactaaaaaaaaaattagccgggcgcggtggcaggtgcctgtagtcacagctactcgggaggctgaggcaggagaatggcatgaacccgagaggcagagcttgcagtgagccgagatcacgccactgcactccagcctgggcgatagagcgagactccgtctcaaaaaaaaaggatcttagagtcatgcttggtatgtaataagtgctataaaagtgttggctgctgttaattattgtgataaccatcaccatcatcatcatatccctgacctttgaggccgatattataagtgcaatccttaatttttcagctttattattatctgatacttatttttgttttgggaagaccaagaatctgacttaatacatacagctgttgctcagctgaagaaacccaggtatgaactacacatttttgactcacatgttagatgggattatttaataactccagaatatttgaggataccaagaaggcagtgtatacacagccatataataacttcttttagcttaaaaagtgaatatttattagatatcttaatagttggggactcttagatacagtaaaaaaaacagctaaattatttttaaaaatcatttggcttttatcacagtgtcctaatttagaggagaatgtgtttcgtagtatatctcttatacttaacatgtattgtagccatttatgctgtttgtcatgcatcataagtacctaactattctgggcttgaagtttgaggtacctaatcatctgtttactctttccctgacagggtactgattatagttatccccagacttttgaaaactctttggcattggcctggcgtagttgctcacacctctaatcccaacactttgggaggcagaggcggatggatcaccagaggtcaggagtttgagaccagcctggccaacatggtgaaagcctgtctctactaaaaatataaaaattagctggccatggtgacatgtgcctgtaattctagctactcgggaggctgaggcacgagaatcgtttgagcccaggaggcagaagttgcagtgagccgagatcatgccactgcacttcagcctggatgactgagtgagactctgtctcaaaaaataaacaaaaaatttaaaaaataaaactccttggcatagacataactttgaatgtgacactgtgatttttttgctaattaagctttttttttttggctataataaaactgatttttccttaactatatagagataataccaaatgtctacatagttctctgccttatttggtgagtgagtttggttcttccttactcgtgggttttgagtagttttccctgtatcagcagctcagatatatcatagccgaggcaaaccaaaatgacaccttaaaccttttgtttcttatttgccttggtaaaaatggttggtagtagttgctcctggtgtgatgttatgctgtaggtgtgacaggatgcatgcgttgttgaacaaatacatttaatgagcacctttgtgcaggttacttgcgttgggcacattgaaggtgcaaagacgtggaagacatggttcttactcataagtttcttattctttagctaagaagaaacaatatgtctccaagtgactagcaaggaagaatgatcacatttagtttgtctggtgataacttcatggaggaggtggaagttgaacttggtcttgaaggatgactagaattctgaatattagagttttgtggggagagcatttcaaattgcagaaatggtatgagcaggaaatagaaattgtttgacgaactggggaagactagcctggttagtctgcagacatcatcactgagagataagttcagaaagattaccatttagaaaagggccatatcatgtagggcctcctaaggcaagttgaagagtttacagacttttaaaaataagtaggtgaggaaaatgagcttcagaggtattaaagaacatgactaaaggcacatagctgagatgatttagaatccgattaaaaatccagtctctctcatagcccatgagaagtctcagctttagtgcagtcctcttagtaggcacagcatgccagtaattggaagttatttgatgtaatgaggtaagataggtatcttcatgggttattcagttgcgtggagaattgtagaacttcataaattgtcctaaacttgctttttagagtttgtgtgtgtttttgaaactctctgactgtaattacttctcacagctgtctgtgggctggcataaagctgtatcttgttcctcccactttactgaatgcaaagtgctgatggcagctgcagcagagcctgggtcccagcctacgacaggtgcctgtggacaacactgagcctcctcagtttcttcatctgtaaaatagggaaaatggtagtaacttcttcatagagttgtactggaaatcgaatgagattgtaaatacacagctcagggtttggcacgtggtacccaatcagtgtttagctgttaggaaaccgcttatgtattaaagtagcagaatctttatgttggaagaaatagtagaagtcacctttgccttttatagatgtggaaactgaggactcaagagaatgaattaatttgcccaaactcattggtaggtttgagaccatgatccaggctcctctgctctgaatcatgtgtgaaatgtgacatcatctgttcctgtaggaaaaccaactctcagattggaaagacgtaaaagtcacatcaccccactcccttgaaatatgctataaatgtgctgtgttagaaaggcaaccactatcagagtaaacaggctctgagggaggccttcggggactcttctgttggagaaggtacctgatgactaacggaggaaggaggagaactgttttcacattgcctccctgctgccgtcacctgaactgttcagagcccatcattaaaagaaaagagtcgggtggcactagtggggaagccataggaaatgtgttataattttaaggttctagagtgattgtgtagtgagagcttagttgcttggaagcctctgaaagacataccaaaattttgttaaaatgttaattttcttttagttggagctcattctaacttgtattgtctaagcaaattttctctttatgatgatttatggtcataagtatgaataactaaggtgcttgctggacttagatgtgaatggatgctgtagcatatgattttaagaagtgtctcatgtcagttttttaaaaattacctgttttttttttaaaggtaaagtgaatcatatgtagatacatgactccttgcagtataatgtggttcttttcagcaaaattaactagatcagggtttcgcaacagtttgactattgacattgtgtgttggacatccaacaaaagacttgtatgtagaatacatagagagctcttacatctcaatgacaagaaggaaaatcccctaagggaaaaaaaaatgggcaaaagattgtaacagatacttcaccaaagaagatatatggatggcaggtaagcacatgaaaagatgctcaacattattagttattagggaaatggaaatgaaaaccacaatgagatactaataaaatctactagaaaggctaaaattaaaaagactggccatattgtgattggtaagaaagtggagctactgagctcgtacacactggtggcaggaatgtaaaaggtccaattatttaaaaacagttgaaggccaggcgcagtggctcatgcctgtaatcccagcactttgggaggccaagtcgggcagatcacgagatcaagagatggagaccatcctggccaacatggtgaaaccccgtctctactaaaaataaaaaaaatagctaggtgtggttgcacatgcctgtcatcgcagctactcaggaagctgaggcaggagaatcggttgaagccgggaggtgggggttgcagtgagctgagatcgcaccactgtactctagcctggcaacagagcgagactccatctcaaaaaaaaaaaaaaaaaaattgaaaaagttagttaagaagttaaagatatacgttctgtaccactaggccattccatttcttgatacttacccaggatacccaagcgtatgccaatgtaaagacttgtacgtgaaagttcatggcctgtcctccggtttcactgtttgggaaattaagcagattaggaattaggtaactgaatgaggaatgaataacacaagtggtagactttgcagtgtgcgtttcaaaatatttaatcccttcttttgccttaattggctttgatttagtatgcagtatgcactggagtctcttaaatgaaaagacctttgagatctcacctgtgggtaattggctctatctctatggacagctttcagggctctcttgacccctacccactcacgtttctggaagtgtgagtcttgtgttcttgctgtatggtgcctgtggagccctttcagtcatgtctttccttagctctgaaaatatttgtcctctctactttttaaaaatggtttttacttctgcagttcctattagataggtgttggttctcctggattagatcaatcttctatgtcttttaatttttctttcctattttaaagtacgatcttccactctttctaacaacatttttatagttttatttatagtttcaagagttctttcccattctctggtcactcaattttcattgcagtctgcttttttatggatgcattattttgaatctctctaaataaacaattagattttttttccccctgagattatcttctgtttcctggatttttgcttcatcgagggtcagttgtttcattaaatcttagaacttcttttgaaagccaccgttagtcctcaaatgtctgttggagtttgtttttttcattcatatgcatgaatgaaagtttgggttcccagatatagacaggtggagttgctctggctgtgtggagtgtgtgtccttagcaggcctcttcccttcatatagaagagggctggaatgggtttctacgaggtggggtgtatggactggcacaagtgcaggtgggattagacccatgctaactgccttgctgcaggcaagcctctgggttggggaacagggtgggagggggctaggatgggaagctgttctgcagatgatttttcagttaatcatggtgacatatgttctgcttcccattccagatctggagacctgccaactctgggtttctagcttctctgtggctctactgttaggataactgtggccctctgggcttgtttggggttgtgacttctgtctatggttattttgtctatggttatactctttttttttttagcactgttgtgaatttattttcttttgaaattggttgttgccattttcatatgacttagagaagattaaacaaatctgtatccttgtctgccatagtgacccagaaggctgaatactttaaaaaataactttattgagatacaatttgtaaaccatacaattcatccatttaatgtgtaaaattcagtggatttttagtacgttcatagaattgtgcatcatccatcaccacaggccactttagaacattttcatcatcttaaaaacaaaagacttgttggtggctccttcctgtagttccagctgcttgggaggctggaggtgggaggactgtttgagcccaggagttcaagtccagtctgggcaacatagtgagaccttgtcttgagcaagaggaagaggaaaggagaggaaaggataaaaggcagaagagaggagaggaagggagagagagagagaaagagaaagaaggaaggaaggaaacaaagaaagaaacaaggaaggaaggaaagaaagaaagaaacaaggaaggaaggaaagaaaaagagaaagataaaaagaaaaaaaggaaggaaggaagaaagagagagagaacacccactgactgtcattctaggcaaccactaatttgctttttatctctagagattttcttattctggacacttcatataaatggaatcattgttatgactagttttgctgtaaaatttaccactacttttttgtgtggaataatagtcgattatatggatggtacacattttatctgttcaccatttgagggaaatttaatacattagtctgttctcacgctgctaataaagacacacctgagactgggtaatttataaaggaaagaggtttaatggactcacagttccacatggctggagaggcctcacaatcatggtggaagacgaaggaagagcaaagggatgtcttacatggcagctggcaagagggagcttgtgcagagaaattcccatttataaaaccatcagatctcatgagacttatttgctatcatgagaacagtatgggggaaactgcccgcatgattccattatctccacctggcgccgcccttgacacgtggggattattacaattccaggtgagatttgggtggagacacagccaaaccatacatttgggttgcttttcctttttggcttgtgtgagtaatgctgttaggagaactgttgtacaagtttttgagtggatgtaggttttcatttcttttgggtatacagctagaagtagaattgccgagttgaatggcaattctacattaaaccttttgaggaacttctaaattgttttccacaacagttgtacaattttatattcccaccagtagtgtatgagggtgtgatattgtgaaatatgtatttggtttttgtccccatttcctggcatacacctcctaaaatccttagaatgtccgcaatgatgtcttcttgtgtgctcatatgttgactgatggctgtcagcccctaggtagcttcaggacggggctgggcaccagaaggacacagcgggattggagggttcggactttctcctacgtgtgttcagggaaactaagtagcatggcagcagcccagagcccccgggtcagtggctacacagcagcagtgagcagcctcctgggaggagcgaagggctgaaggttaagttggccaatgatttagtcattccttcctgtgtgatgaagcctccataaaaacaccaaaggggtgggcgtggtggttcatccctgtcttcccagtactttgggaggctgaggagggtggatcacgaggtcaggagctcgagaccaacttgaccaacgtgatgaaaccctgtctctcctaagaatgcaaaaattagccaggcatggtggcgtgaacctgtaatcccagctactcgggaggctgaggcaggagaattgcttgaaccctggaggcagaggttgcaatgagccaaggttgcgcccttgcaccccagcctgggcaacagagtgacactctgtctcagaaaaaacaaaacaaaaaaacccgaaaggacagcgtttgagaggttttgggtagctgaacacatggaggttctggaaggtggcgtgcctggggagggcttggaagttccgtgccccttttcccatacataccatatgcatctcttcagcgtcctttgtaataccctttataataagccagtaaatgtaagtaaatgtttccctgagttctgtgaggcactctagctaattaactgagcccagggaaagggttgtgggatccttgatctagaccctttcagaagcacaaataaaacaacctggggcttgaaactggcatctaaagtggcaggggtgaggtggggttagggcatggggttaggggtggggtagagggaccaagccctcaacctgtaggatctgatgccatatccgggtagatagtgttggaaatgaattgcattagaggacaactagctggtatcctctgtaggactgattgcttgcttcatgtgtggagaaaatctccacaccttgtggtgtgagatcagaggaaaaattgcttatctgtgtgttttttcttacttacagggttccagtttctccacactcttgccaacacttgttattctctgtctttctttttaaattataattatcctaggagatatgaagtagtatctcattgtggttttgtgttgcatttttgtaatgactaatgacattgagcatcttttcctgtgcttatggtttattgtacagcttaaatatcccatcatgcttaggaccagaaggagttcagattttggattttttgggttttgttgaattttggaatattttcatatacataatgagatatcttgaggatgacacccaagtctaaacatgaaattcatttgttttataattatgattataattatataattataaattataaataattttgtgcatgaaagaaagttcatgtatgctgaatcatcagaatgcagaggtcactatctcagccacccatgtggacagtctgtggttgtgtggcatcaccctcattcctgcctctgaatgtatattcttctaagaagcgatcattttctaacactgattcacacatacatatttaacagtaaaaaaaaaaaacaacataccattaatatggtgaaaaaataaatgtgttcaggatagctaagcagtacagtagcatcaccagaatacctatgttagttcctggacagtggcaggaacaaacaacggtaggctttccgtcttcctctgccatgctgtgttttgattaaaaactctatcatttctaaaatgaggttatagaaaagaaagaaaatttttttaaaaagataagaattcactgtacgtggttttgttttttgagttgagcagaaacaccagtagcagttgagggacctggaagtgagtcctctaaggatgaggaggctttctgctggatggctttttaaatgcgtcctccagtcatcttcctcgttaacagtagtttttgacttcgacttctctctcgaattttataaactggcatgatttcttgttctattatgaatgtaccctgctgtagtccttgaataaacccatcacacattttcatcatgttgtctatgggcacttttttgcagtgttaattaatgtcatcatccgcttgtgttacgttggcactccaacgtttcagattttggagcattttgaattttagatttttggttagggatgctcaacctgtatatctttagagaaatgtctattcagattctttgcccattttttaacatttttccaaaaaattagagaatttttattatatgtatatgtgtgtgtgtgtatatatatatatatatacttttagagatagttgcctggaagtgtggtagcacaatcatagcatagctcactgcagccttgaactcctgggctcaagtgagcctcccacctcagcctcttgagtagctgaaaccacaggtgtacgccaccatgcccggctgacttttgtatttttaaatgttttgtagagatggggtttggctgtgctgccccggcaggtctcaaactcctggccacagggcccagctgtgttttttaattggcttatttgtctgtttatgattgagttgaaagcactctttctataatctgtatacaagccccttcttaattgtatgactctggatactgtcttctattgtattcgttatgttttcactttcttcatagtcatcatttatagtacaaaaggttttaattttggtgaagtccagttatctatatctcttattttgttgcttgtacttcccatgtcatgtcttagaaaccattgcctaagtgaagaaaacttagtcctgtatttccttccatgttttatagttgtaactcttacctttatgtctgtggcccattttgagttagttattttttctttttagtgcaaagaagaagctgaataattctgaataacagatagaatgtgttgggtgaatgttgagcgtctgctttaggtagacgcctcaccatacacacggaattcctggagagcaagacaagaaaaaagtagcatggcagctcagcccctactcatgcctattcagatctttgcatctggctgcaggacccaggaaacctacgagttattgctttaggaaaaatgtgggctgggatagaataccacaaataaacaaaggaagaaatgacaaatctgctaattctcaggttttctgttgatttattttcttgttttcaccacggatagaagttggtttataattttgtggctagtcctttagaaaatcttctatgtttggccatttttatttattttgctcctttctttccactctccagcctccttcccacccattatggaaagcagaaaaatgattttacagtataataacaagtatgtgttagacttgctcactattccttggccgttattaaactgaccatatgttctccattattttagctgtaccacagcctctgcttgatacgcagtagtttccaatggtctgttttggcttgacaaagtgggccaggaagtgactataactttctctttggctagggtttttggtatagtaagttagaggttccaccttattccacactggcccacgtatctgtagaatgggctgtatgctggtagccttaactacttctttggaattacttggtgttttatatactaagataactaagaagtgttgcagaaatcaaccaggagagcatactgaaaagcatatttctactgtctgttcagtgtttttgtctacaagatctatttttttagattggtgtttaatatatgtatatatatataaaacacacacatatatgtatatatatatatttaaagtagctgttgaaaagctgaggagcaggatttgacttttttgagagtaggatcaaatcagctttggaacagcagtggacatcacatctaacactgtgaagtatatacagccatgtgtcatctaaagaaagggacacattctgagaaatgtgtcataaagcgatttcatctttgtgcaaacatcataaaatgtacttacgcaaacctagatagtatacctactgcacacctaggctctatggcttagcctgttttttctaggccacgaacctacacagcatattactgtattgaatactgtgggcaattgtaacacagtggtctttgtatgtctaaacatagaaaaggtacagtgaaaatatggcattataatcttatggatcagcgtcctatatgtggtcattggtgagccagatgtcattatgtggcacatgactatatttggtcttccctctgagtttcctcttaaaatttctaggattttcaaagtggtatgtctttttgtatgctaatgaattaactgatgcctggcaacccttatgtggctttagaatggggctaccttgtccaagcttagagcaagcttatgcaacccacagcccatgggccacatgcagcccaggacagctttgaatgtggcacaacacaaatttttaaactttcttaaaacattatgaggtttttttttcaaagctcatcagctgttggtagtgttagtgtattttatctgtggcccaagacagttcttccagtgtggcccagggaagccaagagattggacacccctggattagagggttgagactttcagtcccatcccctaacctctggggaggggagaggggtgaagtttaaggaaatcaccaatagccaatgattgagtgaatcatgcttactaatgaggcctccataaaaacccaaaaggacagggtttgcagagctccctgaaagacgaacacatggaggttccaggacggcggtgtgtccagagagggcatggaactctctgccccctcccacatgccttgccccatgcatccctttatctgtatcctttgtaacagcctttatcagaagttggtaaacataagtggttccctgtgttctgtgagctgatttagcagattaatcgaacccaaggagggggctgtgagaatcctgatttatagccagtcagaagcgcaggtgaaacaacctacggctttagatgggcatctgaagggaaggggcagtcttggagactgagtccccaacccgtgggatctaatactgtctcgagttagatagtattgcagttgaattgaattacaggacacccaggtggtgtatcctgcagaattgattgcttgctcggtttgtggggaaaacatttggtcacagaagtcttctgtgtaggttgagtgagagaataggaaaagcacttccgtttagtttattcctgtgttctcagaatgtcataattagaactgagaactttaatctccacagacttgctgcaccagatgtaattgaggtcaaacttttttcatgtgcttattagccatttatgattcattttgaaagattttcctgttcacgagttttatattggagagcttgccttttattgacttacagaactctttgggttccgttaggacgtgttagagtaaactttaggtccttgagatgttgcagaatccctgaacaaaccgttttttcattgtcaggtgtatgaactgactcacaaagtatgtttttagcagtctcccttcatggatccttgaataaactatctactcttcagttttatttttaggtaggaaatatcttttcccttctataaagcagaagtgacatactggcatttttaacttatgatttatttggtctaaccaatgttttattaaaatattgagctaacttttaaaaactgggagatttcatgtaaaaatccagacttgaagcttctgttgctgaatttgaggaatgccaacactgagtgtgccttggcattgacatgaaatagtgctggtgccttcagagcacaggtacttggtcaccactccctcctgtgttctcataccttgcctgccttactcatttatattatctcctgaagcccgtgaacactgggcttatggcctctgcatacatagtgtatgactttatacttttgcccatgtgttccagttgtgagtttcattatgtcacactttgcaaccccaagtagcatccagagatggattttctatgaagccaatgcaggaagcattcccaaggctcccagaaacctgccatttttttgttctttttcttaaagagactccccgtgaccacctgcccagttgtgtgtaggtttcaggacccacaaaactagatctgcctctgccagcatgaggatctcctgtagaccttttaagaaataataaagcttcctaggctctacttaacccatgcctatgcagttagaatctgtgggcaagggatgacccaagcatctctacattttaagcatctcccctagtgtttgttgtcatgcacatacaggctcgagaaccattgtgttttaaaagataatttacttgagatgtttataaaccattttaacactaaaaggatgcattttggaatcatttaatacatttaaactgtagtttgatatattttactgacatgcagagctgaactgcttaggaaccactgccaattgaatactaatagtgagaagataattctgaaattgaaatatgtcaacaggaaaatgcaatttgattgttaaaaaaagtagtttacatttgttttttcaaggatttctgaagaaggtttctcatatctgtgaaactgtcattccattcatgtagaatttcaccagcaatttctgttatggtagaatttatgtaaatatttgcttttgaaaatattataagtataggtagaatcacgcagagattctggagtcactatcatgtatgatagtgtcacaagggaaaataatactatagcctgacacaggtacctctattcatattgtttggggaggttgaatggttgggtatatttttagttatcacagtgattggggatggagggctaggtggctactagcctttaataggtggtgatgaggcatgctagacaagttttagtccctgggatagtaccacaccaggaagaactattctacattctgtatggcctcgaatgtcctgttggacattcatgtaggagaaaaatatgtttctaatgatccggccttaggatatgtcaataaaaggttttttacttaaatggttttaagtatcagtgagttttctaggactgtaactaccatgtaaatcgagagaagattatactttgttttgtttgcaaatttactaaaagttgtttactatttcaaagtatcacatccaagaaagcagcgctcatgctcccgcatcaccatttcaataccgctgtatctgtccacactcgaaccttgctttcagcatgattctcctttaggtacaagcaagtgtctgactaacctgagcatttatgtaatgaaaatcattttaattttatttcccctttgtgatatttagggcattatatggattattttgaattttatatttaggcagttatattgttgatggatttcactgtaggataataaagaaggcattgcaaaatgttacgaaaaggtatttttgcccttaaagagttgagaattgctgttttaaagcgatggttcctaagcatcagggcacattagattgtcctgtagaagttttggaaatgatcattgtgaacctgccctagaaatactaatttagtagttctctaggaaattctagaaactccatgaaacttttttttttttgtgattgttttttttttttttaatttatttatttttttattatactttaagttttagggtacatgtgcacattgtgcaggttagttacacatgtatacatgtgccgtgctggtgcgctgcacccactaactcgtcatctagcattaggtatatctcccaatgctatccctcccccctccccccaccccaccacagtccccagagtgtgatgttccccttcctgtgtccatgtgatctcattgttcaattcccatctatgagtgagaatatgcggtgtttggttttttattattgcgatagtttactgagaatgatgatttccaatttcatccatgtccctacaaatggcgcacatagaaaattacactctttgtattgcgcagggaagtgaaggaaagcagtggtcttgggctgcaggtgacagtttctggggatcctggccgccccagtcctgccccgccccaccttgcaagccaacgatctgtttccaccttggatgctttccatgcttgttaaaaattcagattcttgaacctcactccagtaattctgattctgtttgactcagaaatctagtattgaatgagctctcggatgatcccgattcaggtagtccttggatggctgcttgagcaatcctgttctcacgggtcaggggcaataactgtgtggtgtgtgaaaaagaaagagaaaaaggaaaggtggggctcctttctaagggtgtgtgaggtaatgctaagagatttctgagataaagcagagatacgaaactccttcctggctggcgtttctctatcaaggagtacagtcagcttgtttgaaagggtagaacaaacactgctagaagaagctgaagccccggaagagatcacctggctccttttgtatgaatttaaactctgaggcataatatcctaagaaactgagcatatttgcaggtaaattatatatccactctagatattctttgaaaatcatgaagatagggactagtgcttaaaaaaaagaatccaagaggcaaaaccttaatctgtagaaaggagaattaaggaaattgtagagcctggtgagtttcagggcggtctttagccaagctttagaggattattaaaaatattgcaagaccagatagtcttccccgggtctgaactggcacttatgaatgacgactgaatggtgggaaccagggaaaggggcacggtacaggtacagtgccctccctccacgtagaagaccaaaaaggtggggtgagaggctttgagggtggtggaagtttgacaggttggtggaactggaagctgtgttgcatagctggaaacccacacattattcacattttctgaatggatgttattggaacacagttggagaaatgctgatgtactgggaacaggcctgggcaaagaatcaagaggcctagttttttgtttattagtatgtcaagtaccagatgctaaaaacttccttcagtacattcctggaagtatttactttttcaacacgcattcagtgaatacctgtagttgctgggctagaggtagaaatatgaagcctacagcctgactgtgaagtctggttggagaaacaggcaagtaataacatgattctgacacaggatgatacctgctacagtagaggtaagaacagaggctttgggaggctgtgaatttgtacctcagtcaggatggagagaaggcttcttggaagaggtgacatctgagatctgagcagagtttttgaagataatttagaacgggtgctgggaagaaagatgttttgacagtggcagaagcacatataaagctgtggtgttgtgcagaccatggcttggtcagagcagctggtgtcaagagggagcaatgaactagaagacttcaggtgggcagggactaggttatgaatggtcttacgtgccatgctaaagcatgctgtaagtgtgtattttattaattttttaaaaaaataatggattgattctccacatttagggtttaggaaatcagtctggaaatcattctggaagtaggaaatctagagatagattgtggttttggagaggtgagattggaggcagtgaaccttgttaggatacataaatacataaacacacacgcccacctgcccacacccacacaccggtggcttagacaaaataaaagttctcttccatgaaaggaatccagatagatgattcacagcttgtatgttggttccacggtgttgcaggtcctggctactttgggctagttggtctgccatccttggagattttctcatcttctgatgtgtttgcttgagctccacgttcctgagagcaggaatgcaaggggcagggttgggggtgggaaatcgcaagagcaaaggggcatgcactagctgtaataaaaggatatggtaagtctttaacatccttgataggttcttggaaactgcgacttcaagcgaaacatataggatgtgtaacaaaactaattatgttatcaatataacaaaacagtgttatttgaggacttgctgtaggtcgttttgcttaaagtcttggtttccaagaactaatctgcaatgttgagtgaggacttgcttttattttggagaaattgccacggaagacttctagttagagctcattgcccctgtgtcgtgccatgatcacttttagctgtaagagaaaggctgaaaatacagtatttattcagcggccgtgtgcctagctaaaaatggaggggttctatcagtaagggaagaggagaaatggatagtggggtaaaccatctccatctctgcctgaaagtagtgcaggaatgcgagggacacataatgaagacctgaactgaggcagtggagatacagaagacgagacatactgcagggattgctgatattggttactgatatgatacgggaagaaaagaaggtgaaggcattgagggtagtttctgctttgggcagctgggtggatgggagggaggatttgggggtaaggtggaagaatgctgacactttgggacatgttgcgtaggagatgcccatggcacattcagatgcagatattcagtgggctggtgggtatcaggtctgggctagagggaagagattttatattatttaaaaagaaatgttaaagacttctctcccttatttccttttttttcatttccttcagctttattaagatataattgacaaaaattatatagatttatggcatacagtattatatcttcatacatatattcgttgtgatatgattaaattaaattaattaacatattctttaccttacatacttatttttttgtggtgggaacatttaagatctactcctttagcaattttcaagtgtgtgatacattattgattataggcaccatgctgtctgacagatctctagaatgtattcattccatctaactgaaattttgttccatttgaccaacacctcctcatcctcctccctgctgtagcccctggtaaccaccatcgtactctttgctactgtgtgctcaacattttaagattgtgcacgtaaataagatcgtgcagtatttgtcattctgtgcctgacttatttcacttagcataatgtcctctaggtttatccgttttgtcacaaatgatgggattttcttctttatttttaaggctgtatagtattctgtttgtgtgtgtgtgtgtgtgtgtgtgtgtgtatatatatatatatatatatatatatatatatatatatatatatatatatatcactttttttaaatccattcagcaatccatagacactgaggtcaatttcatatcttggctcttgtgaataaagctgcaaagaatatgggaatgcagatatctctttgacatgctaacttcatttcctttggctaaatacacagaaatgggattgctggatcatatggtagttctatttttacttttatttttattttttttgagtcggagtttcgctctttttgcccaggctggagtgcaatggcacgatctccgctcactgcaacctccgcctcctgggttcaagcgattctcctgccttagcctcccgagtagctgggattacaggcatgtgccacccatgcctggctaattttgtacttttagtagagacagggtttctccatgttggtcaggctggtctctaactcccaacctcaggtgattcctcctgccttggcctcccaaagtgctgggattagaggcgtgatccaccatgcctgccctatttttatttttttaaaggaacttccatacttttccaccaacagtgtacacagttccccttcttcccacatggctccagcatctggtactttatctttttgatattagccattctaacagattcgaggtgataccttatcgtggttttcatttgctttttctggatgatgattagtgacattcagcattttaaaatatatctgttggccatttgtatgtcttcttttgagacatgtctgtttcagtcctttgcccataggaggtttttaaattgggttatttgttttcttgctattgagttgtttgacaaataaaatgtatatatgtatttatatcttggatattttggatattaactgcttataagatacatgatttgccacgtatttactcacttctgttggtgtcttttcaccctgacaattgtttcctttgttgtgtgttagctttttagtttgatgcaatccaatttgtctgttttgcctttcattgcctgtgtttttggtgttatataccaaaaaatcatggcctagacgagtgtcaagaagccttttttcctatgttttattctagtagttttgtagttttgggtcatacatttaagtctttaatccatttgaggtgatttttgtatatgttgtgaaataagggtttaatttcattcttctgcatgtggatattccgttttcccagcactgttcattgatgttctttccccattgtgtgtccttgatacctttgtcaaagatcaattgactataaaagtaaggctttatttatgggcttcctattctgttccattggtttaggtctgtttttatgctagtaccatgctgttttggttaccatagtttcgtagtacattttgcagtcaagtaacgtgatgcctccagctttgttttgcaccagattggtttggttatttggggtctgttttggttctgtatgaattttagaattgttcttccatctccctgaaaaatgccattagaatatttataagtgttacattggatctgtagattgctttaggtaatagggacattttaacaattctttcaatccttgaacatgggatatctttccatttatttttgtcacttcaacttttttcattagtgttttatagttttcattgtataggtcattcactctcttggtcagatttattctgaagtattttactttttgtaggtgttacaaatgagattattttttgatatctttttttggatagtttgttattagtgtatagaattgctactggtttttgtatgctgattttgtatcctgcaaccttactgaatttattagttttaacattttttttggtggactctttaggatttctgtatataaaatcatgtcagttgcaaaaagagaccattttacttattccttttcaatttggctgccttttatttctttttcttgcttaattactgtggctaggagttctagtactgtgctgacagaagtggtgagagtgggcatccttgccttgtttctcaagagtgtgatgttagctgtgggcttgtcacatagggtctttattatgttgaggtacattccttctttacctgatttgttgaaaggtgttttttttttttttctttatcatgaaagggtgttgaattttctcaaatgctgtttatgagtctatggagatgatcttataatcccccatctggaagggaatgtgtgtaggcttgctattggagcctttgggcaggctggttcctggctcccctggggtttgcttagagcctggattttcaggttcaagtctggagcctgggtttactctgatgggcccggagcttgtgtctgttgagttgggcctagagcctgagtttgtgaggacaggcccagagcatggatctgcaggggccagcctggtgctgagatgggcttggtacctggatcaatagggttggggtaggagcctgagttcgcagtggctggcctggcattggggtgtgcttaaagcctgagtctgtagtggtagaggtaggatctttagtttgtggggaccatcctggtacctgggcctgtacgggcagtcctggatcctgagtccatgaaggccagcctggtgcttagaccctgggttcactgggggcaggcctagatccttagtccgctggcactggtcctgcctggagactgggtccctagggatgggcctgggtcctgggttcgtggcagcttgtgtggccccagggtctgctgaagcaggcctggatccttggttctgtagagcatgaggcccctgaggctggcctggctcctgggaggcctggagtctctatctgcaagggccagactggtttctgggtctgtgggtgcaggtctgaagcctttggccattggggcttagaagacattttggaagtgggtatgattgcccaggaatcatgtggaaaatgacaggaaatctgaagtttgcactctaaagaaaaaaaaaatgaacaggttgacaaagtagtatttaaaataaatttagaagaatcaacccgagatagagaagggaaactttaacagaaaaatatttggaaaacgagagagaggattttcaaaaggtggcagtagttgcagagacatgccatggatgagtccagtccaataaagactgaagcatctagcaattaggaggtaattgaatgcattgaaataggagaaggagagtgtgtgtgtgtgtgtgtgtgtgtgtgtgtgtgtgtgtttgtgtgtgtgtgtgtgtttataaagttgtttagattaaaccagattttttttttaatgatcacacaattattgaaattactcagggtagatggtggccgtttcttaagtagctctaggagtgtactctacatcccctgggtgccttgccactcagcagcccacttggggcttttgtcattgtgacagcatggtaactgtttctctcaagctaaaatttagggtgtatttcctgttgcatgaaaatgttttttgggaatagtgggtagatatttaatacagtggccatcatgaactagcttgaaatttgtgatgaagcaatagggtcccacctgtcactgttcactgctttctctgaacttcaacatcaggttgccaaagaggaggagggttctggtcgggactgaagcagccctggtcaggttgtggaactaggtgtggtgagtgagtgtcttcatttcttttaggagaatcctagccacagagatgataaacattaacaggcacaaaatgattttgagaagtggaccatcttttagattttcacctaattaaagatatctaaattaaagatttttaggttttccttcaaagaatatatatatttttttccttctgaaagcttagaaagaaatttaagtacaaaagttttattccttttaagaactcagttctgttaatagttagacaacactgccccctggtggactgaacctgcaacacttttcagtagcggttaacattgtgaagcgctgttcctgaaggatattcctgctagcagatttccttcagatttgtttcggagttaatactcttttgttctttctgcttaatttaatctggaggtttgtcaaaatcccagtggtgtacaaatattccctgttatatcttaatctcattatgacattatgaaataaggatctgggattttcatggcaaaaacttctcagatggacattttggtaggccccagaagacaagatgtgttaacaagaatatatgaaacctggtctagtgggttgatttttttcctcatgtataaatttttcaaaaccttctgaagaaatcattcttgttggagtcataataattgaaagactaatgtgaaaggtcccacttaacttggctgtttgtggacggatagtttttgagttgttgcatttgttttggtgtgtattaagttacggtgtaggctgacaaaatgtgtaagatatttttcttaatttggggtgttcaaacctgagttctctgcttcattgtgttcatgatgactagtgatgtgtgtggtggggggtagagtgtgtgtgtgtatctgtaggtgtatgtgtacatttatatatctatgtctatatatatatccctgagttatgaattataaaaaatgaaaatgctgtttggaaagcaaacataaagatttcattttctgttttatcacaccaaattgcagaagtgaacgctcttacatcattattatgcaacagacactctgctaggaactttttgtattattcttggaacctcagacagatcttctgatacagtttctcccctcacccccattttatagatgaggttcctgagactcactgaggcccagtaacttaactaagctcaggttacacagcaaggaagtcacgggtctgccatgcccagtcaagcatgacatcaaggctgtctctccaccatatcctgcagccttacaggaaattggagtgaagtgccactggctcccaagtgacagtgtgctaactttccttgaaagtaggctatacttctggctttgttcttaattgttagtattgaatacattatttaacttctctggctttatttttgttatttcagtctttaaaccaaagtctgtgtctgtgtctccctgtggtttgaggaaagaggggataatgctatgaaactgtgctcccacccccactctaccgaaaacactccctcttttatctgttttattggttgactgattgattgacatggcctcattctattgcccaggatggagtgcagtggcatgatcatagtttactgcagccaggaactcctgggctaatgcagtccttccaccccagcctcctgagtagctgggactacaggagtacaccaccatgcctggctaacttattttttttttttttatttttttgaattttatgtagagacagagtcttgctatgttacccagcctggcctggccttgaacttctgtttgttttattttttcgacttctgtgtcagataccatttgaaggcacaatttctttgttaaaataaaacaaaacaaaacttaaaccactaaactatatgatttttcccatctagctgaccatttctttatggatcttggcataccacaacagctttttgtatttttcctttggaagagaaagaggatatggcctggggcatcagacttttcttttttttttttttttttttttattatactctaagttttagggtacatgtgcacattgtgcaggttagttacatatgtatacatgtgccatgctggtgcgctgcacccactaatgtgtcatctagcattaggtatatctcccaatgctatccctcccccctcccccgaccccaccacagtccccagagtgtgatattccccttcctgtgtccatgtgatctcattgttcaattcccacctatgagtgagaatatgcggtgtttggttttttgttcttgcgatagtttactgagaatgatggtttccaatttcatccatgtccctacaaaggatatgaactcatcattttttatggctgcatagtattccatggtgtatatgtgccacattttcttaatccagtctatcattgttggacatttgagttggttccaagtctttgctattgtgaatagtgccgcaataaacatacgtgtgcatgtgtctttatagcagcatgatttatactcatttgggtatatacccagtaatgggatggagacttttcaatacaagttcctttccattgggagcatttgggtgccaatgacagggcattcagggaggggagcgaactcttcgtggggcagtcctctgtgtctcaggctgctgaaacatctaaattccttctctgttataattgggcaccagcctgccactttttcctttcgctgtaacttccagcaaccaaagttaaagcccctgcctcccagcggagggaaattacaatgtcaggaatacgatagaagtaaaaacatataaaaacaaagaaacataaattacaatttctgtttacttaaaacattgtagaattaaagaagtttaaaaacaactacaggactggcatggtggctcacacctgtaatcccagcactttgggaggccaaggtgggcagatcacttgaggtcaggagtttgagactaggctggccaacatggtgaaactccatctctactaaaaatacaaaaattagccgggcatggtaacgtgagcctgtagtccgagctgctcacttgggaagctgaggcaggagaattgcttgagcccaggaggtggaggttgcagtgagccgagatcatgccactgcactccagcctgggtgacagggcaaggcttcctcttaaaaaataaaattaaaaataataataataagaagaagaaaaatacaaaatagccgagaagcaagaccaaatacccttttatccatagctaagttatctgtgcctttatgcaacaatattttgtgtgtgagtgcctataccgttcatatattgaagcatccagtcacagtttgttcatttggtaagacagtggtgttaatggggccacggtcaaaccttaagggagagataacgttcatttctgtacatcaggagctttgcaagctattttacagaaatatgtttgttggttttagggaaacccaagcaaattaatagggatggctcaatgcaatacccaactacactaggaaaaagcaacttagagtatttgcccttttgatgatgattgctaaatatctgaaatgtaattcctttagttacccttggaacaattgtcatagtgaactttgtcatagtaaactttgagttggttaaaatgagtagaattaaagtagactgagaccctgttttagttttctatttaaagtgaaaatgactagagactcttgttttgtgtgtggctgcaggtttcctagaatttgtcgggaactgagatttgtatagttttgattctcatatttagatagttttaaaaaggggagggcaggaaataatgacgtttaactaatttctgcacataattatggagtatttgctgtgtacccaatattgctagtcattgcttataaggagataatgaacttacaagcaagacaacattcatacgaggaaccattaaatagaagatgatacgtaattaagtgccaaatgattggtacgaatctcatgaacagatgacttgtttcatgctgaagatcctgcacagagacagacgtgctttcataaggagacagactgtttgagatgatcaggatcagaacgggaagtcagggatatgtggttatcatatggacaggaggggagaagcagtgcagggtgaaaggggtaatcagaggctttttccaggtatgctcatttgttctttgccttgaaaggtaagtattatttgaatacatggaaagcatggggagaatttggttctaaaaagacctgagactgagtacaggatgttgtggaggatagtagattattgactaagatggagaagtaaattaagatatgatcatggaagaccttaaatattaatccaaaaaatggtgatttaaagtgtatatttccaaaagtcttacttaattgcttaatttgggtgactgccctctttctggggggcctccactccaccttagaatttgcctctattgttgaaccaatcattcattctgaaaggcacaaatttatagatatttcttttgccaacagagatgaaactacatctggttatcttattggcatttggctatttttgaaattctatattaatttacctgttatcaattctgcattcatcagtttatctacatccatcaatatatgtatattctacagatagtttgattttaaccatttcacgttgcatacttaaaatttagaattttgtgatatattgctgtcattcttgtgtgccgagtgcaaaagattataaaaattaaatccagcttagcaatacatttaataaattcaacttattgaaaaaagtttaaatgaaaggaaattgaaatgcggcaactatgtatcattaatgttactgtttgttatttgtctgttgttgtattcacggggttgttactctgttggtacagtcatgtgctgcttaatgatgggtatatgttctgagaaataggtcatcaggcgatttcgcccttgtttgaacaccagagtgtacttgcagaaacctagattatatggtatatgagacacacctaggctatatggtatagcttattgctcctaggctctaatcctgtgcaacatgttgctgccttaatgcagtagacagttgtaacacaatggtaagtatttgtatgtcaaaacatatctaaacatttaaaaggtacaataaaaatgcaatagaaaagataaaaggccaggtgcagtggttcatgcctgtaatctgagaactttgggaggctaaggtgggaggatcactggaggccaggatttcaaagaccagcctgggcaacacagcgagacccccatctctacaaaataaaataaataaaatgaaacaatgaaaagacaaaaaattgtaccatcatatagggcatttaccatgcttggagcttacgggactggaagttgctctgagtgaatcggtgagtgaatatgaaggcctaggacatcactgtccactgttgtagactttatgaacaatcaacacttaggctacgctaaatttataaaaaatatttatctttcagtaacaaccttagattactgtaactattttactttgtaaacttttaactttttaaaacctttggactattttgtaatgatacttaaaatacatatacattgtacaactatgctaaaatattttccttattttcttattctataagcttttaataatgttttagtttttatattttctttttaagctttctgttgaaaatgaagacacagaaacacacattagcctggacctacccagggtcaggattttcacgatgtcactaggcaatgggagtgttttgcctccattgtaatcttacgtgtatgtatataattaggtatataatcttttgtatatgcagttagtcattgactgaaatgttcttatatggtgcatgactgtatttgtttttatttggaacttacttgtttttatttctaaatctgagttttaaatagacactacaattactttcttatgctaatttttcttagttcaatttattgttttaggatatgatactaccacttctgatttgaaggtatgaagtttagcaataagatcatatatattgtccctacaaaacctgtgtttgtgcccctcatatacatggcaggatcaccaggccatcagagccttcctagcaagtagtaacatgaaattgaaatctttaagtctttggtaatattcctgctctcccctcacccgtttgctcctaactatgaatttccccatttccaatgtttatgatcttcgacaccttctaatttgggtatgaattttaaaaacacggccacatcttattagtgcattgaaatttctttgaatgtcttgtgttaaaaggaaaatttattaggtgagttacagctgtgagtagctaatatgagaccctttcaggcagggtttcttaactttaggggatctggagcacccagatatttgatgaaaaattcgtataaatgtttatctgatattttttgtcaggagagggtctgtagctttctcaaggatgtctttctcaaagaaaaccacttttctgagacttaaagaacagaaaaatcagtgtattatatttttgccggtctttcagatacaactgttatcctagttcaatcacactaatatgatgtttactataaaataatctcttctaagtagttcagttactgaatatatattgttataattgtttttgcaaagcgtatctcattctagaaagatcaaagaaccaatttatactttgtttcttttttcatcttgaaaaatgatatatttactgtaaagagaccacttgctttaatcttagtaagtatagggagtggtaaaaattattttaggcctatattcgtgaattatttgtatgttaatatcatccagtaaaaaataatgaataccttttgacttcagaatactatgataggtatttaggatctagaaaatgtaagataaaaagtaagtagggaagacagtatgaaattatgaaaatataaggacgcatagaaaagtataggcaatatatgttttcagaataaaagaagaggccgggtgtggtggctcacgcctataatcccagcactttgggaggccgaggtgggtggatcacctgaggtcaggagttcgagaccagcctgaccaatatggtgaaaccccgtctattaaaaatacaaaaattatccgggaatggtggtgtgcacctgtagtcccagctactcaggtggctgagacaggagaattgcttgaacctgggaggtggaggttacagtgagctgagatcgcgccactgcactccagcctgggcaacagagcaagactccgtctcaaacaaaagaagaaaaggagaggagaagtcactgagagttggtgaggcatggagagcttcattgagagctcaggttatgaaagatgagtaggacaaaattagagagggggaaataatttaataagcaaaagtgcagaggtgatcatgtaacttaggggggatgctgagttgaccaatggagaggcagctttttgtaatggttaacagcttggattcttcatccagcttctagtcctggctataagctacttaaaacactctcgcctcagttttttaatttgcaaagctagtacctttcttataatttaatatggtatgtatttgctatattttaaaagaaaaacctaatacacagtgccagcaagatagcagtagggaaataaggtggggagttagtagccagattgcaaaagttcttgaataacaagttaaaggaaagattggcaaactatggcccttgggctaaatcctattcctctcttgtctttctagatcacattttattggaaaacagtcttatgttaatttactattgtctgtggttgttttggttgcaatggcaaagttgcgtgtttatgtagagaccttatggcccagaaaggttaaggtatttactgtctggtcctttacagaaaaaaatttgctgaccttgagtaaacaattacagctgtaacataattacagaagatgtacttaaaatttttattttgttttgttatttacttccaagatacaatggtagtacaggtattgggtacacattaccatttcaaaagggagagatcagccaaaagaaaggggtagtaggccccacacaagtctgaaacccagcagggaagacattaaaccttgaagttccaacatagtccttgacgccatgtcttgtatcctgggtacactggtacaaagggtgatccgctgaagccttgggcagccccatcttcatggctttcttgggcacagcctgggttggagtgcaatgcctgcagcttttctgaagttcagagtgcacactggcagtggctgtacaatcctggggtctataaggttgatccctcatgagtggcttggtgcctccctgaggtaatgagtagttctcactctgttagtttatataagacctagttgtttaaaagagcctagcacctccttctctctctcttgttccctctctcaccttgtgacatgcctgctatccctttgccatgtaccatgagtaaaagcttcctgaggtcctgaccagaagcaaatgctggcactatgcttcctgtacagcctgcagaactgtgagccaactaaacctcttttctttataaattactcagtttcgggtgttcctttatagcactgcaaaacagaatcatacacttccccaggcagaagtagagccacatcacctacccctctccccgccttcttgggctgagctgaagtggtgccctttctcctggggaaacagtactttggctactcggagaagtcacaccttccctcagcctaagttggagggtgccacatgtccccaaaacggtgccttggccccccagaaaggtcctatatcctagtacctaagctgaagcagcagcctgcatcctagggaaactgtgcctgggccatccagaacagtcaaggcccccaggcctgagctgaaggagcacattggtccctggggtatcagtgccctggctgagctaagtagctacacatccctgggctgaactgacatagcaccccatataacagggaagtagaacagtggcttagctgagacacactggcctatagaccaaacagctcttgtatcctgcttccgtggagctggtctaggccctagagtctgagctgttgggacacatctgttcttgaggaatggaatcatcaatgtgctatttcctgaccccacactcttcaccccaccatgctgcaaaaaacagctattctttgccattcccaggtacttgctgccactgcacctggcctcacagaggctcagatgctgacgatcactgccaacccagggtctagagtcactaccacaaggtgactcattccctgggacccgagttgccgttcgggtcaagttcccaaatcgcagtcataccttgcaccttgagcctaaaccttcagagtatcactttcctggagttgggtgagtgcttcactgtataccctaaaagtaaaatcacagctacaacctggccccctgagcctgagctgctagggagtagctctgagtcacagatcctggttccgggggcaacttacatccaatcctttcacagacagcaagttcgcactccaagatgcaggtgccacaggaggttcacaagattctgagcctaggaccctggccccacagccactccaagcaactcagtgctgttacagccacttgtaggccatgtcagacctgacacctagagaaatcccctcatctaagtctccccattgtgtggaaaatgagaataggaggactgaagacattagcagcctatgccactgtcaccactgccacgaacatctacaacatacgccactgaggcacccacagttattgctgacattgaatgcagatgaagagtctgcacagagactctactactgcacctgtctggaaacagttaccacattctttccaaccagcacagtaaaaccctactgaaggtcaaagtctttctgtacaaaagccagtctagtaagtttggaagaggctaccgttccaccagacatcaacacacagatatctgccacacagacatcaacacagggagacaagacatgaaaaggcaaggaaatatgacaccactaaagaaacataataactctgtaataacagacctcagtgaaaaagaattcaatgacttggtggaatatgaattcaaagtaataattttatggtaactcagtgaaaaacagaaaagagagacaatttaatgaagtcaggaaaacaattcaccatgtgaatgagaaattcagcaaagagagagaaattataaaaaagaattaaataaaaatcctgtatttgaagaattcaatcagtgaaataaaaaaatacagcagagaccttcaatagaagacttgatcaagcgtaagaatctctgaagtgaagaaagcctataagacttgtgggacaccattaagtaaataaatatttgtgttatgggatttgcagaaggaaaacagaaagaaaaaagcatagaaagcatatttaatgaaataataactgaaaacttcccaagtttggggagagatatggacatctagagccaggaatctcaaaagtctccaaataaattccacccaaaaaggtctttttttttcttttttcttttttgcctgaggcacatttatgtcaaattgacacaagtcaaggacaaagaggaaattctaaaaacagaaaaagaggagagtcaaatcacatctaagggactctccattagactaatagcacatttctctgcagaaaccttacaggctaggagagaatgggctgatacatagtcaaagagctgaaagagaaatactgccagccaggaatactatgcccagcaaagctatcctttagagatgagggagaaataaagtatttcccagacaaacaaaaactgagagaattcattaccactaggccaaccttacaaaaagtgctcaagggagtcctgcatctggaagtgaaaagatgaaaatcactatcatgaaaacaggcaaaattataaaactcactggtggagcagatacacaaaggagaaagaggaaagaatcaagacttaggctacagaaaaccaccaaactgcaatgatagaaaaagaggaagaaaggaacgaaaggaggaagaaaggaacaaaggatatacaaacaacttcaaaaacaaattaacaaaataacaagagtgtgttctcgcctatcaataatacccttgaatgtcaatggattaaattctccacttaaaagatatagactggctaaatggatgaaaaaacatgacccagctctatgctgcctacaagaaactcactttacctgttgactattaacaacacaggttttgacctgcacaggtccacttatattcaaatattttaaacaataaatatgttgtttaattttttgggagatttgcaacaatttgagaaaacttgcagacaaaccatgtagactagaaatactggaaaaatgaacaagagttgtgacatgaattcataaaatatatgtagatactagtttaatcatttattaccatgaaatagaaacacatctactttaaaaagttaaagtttatcaaaacttatatacaccagactgtacatggtgccatttgcagtcccgagaaatgtaaagaaacataaagatgcagtattaaatcataactgcatacaattaactgtagtacatactgtactatataataatgttgaagccacctgttgttgctattgcaatgagcttgagtgttgtatctgcttaaaacactgtgtgatgctaacagctccatgtgaaccattcatctgtccagtaaattatgtgttgtattaaaaagtgatctccatgttggtgcacacctgtagtctcagctacttgggaggctgaggtgtcaggatgtcttgagcccaggagtttgagctatgattgtgtcactgcattccagcttgagtgacagagcaagaccctgtctcccaaaaaaaaaaaaaaaaaaaaaaagagttgtctctcatggtttttgtgtatttttcatcatgtttagttcactactataaaccttaataacaccgtggaacccatacaaagtaccactagtgatgctggaagtgctcccaagaagcagggaaaattcatgatgttataagaagggtgaattgcttgatatgtaccaaatggattgaggtctgcagctgtggtcacctgccatttcaagataaaagaatccagcagtgtaagtaccgttgtaagaaaagaaaaggaaatttgttgtcactgcagctccctcagtaggcacaaaaccttgaacttttttatattgaaaatgtagctgttatgtggatgcaggatacctataagaaaatcatgcctatagactctacaatgatttaagaaaaaatgaggttagtgtatgacaacttaaagcaaaaggaaggtgttagatctaaacttggagaatgtaatgccagcaaaagatggttcgataattttagaaagagatttgccttaaaaaatgtcaagataacaggagaagcagcagacagccaagaagcagtagacaagttcccagacaccattaagaaaatcattgagaagaatggatatctgcctggcaggtttctttcttttttttcttgtagaaaaaaagtgccccctttctggaaaacagttccacaaaggacatttattagtaaggaagggaagtgagtacgaggatttaaggcaggaagggataggccaactgtattgttttatgcaaatacagttggatttatgatgaggaatgcccttgtctataaatttctaacccctgagccttgaatagaaaagataaacacagataccaatctttgggttatataacaagaagacctgaacaacaagaactcttctgctggattggttccatcagtgctttgtccctaagttcaggaagtaccttgccagtaagggactgccttttaaagttcttttgatataggacaatacccttagccacccagaactctatgagttcaacagtgaagacatcgaagtcatctgcttgcccccaaacacagtatctctaattcagcttctacatcagggggtcataaggaccattaaggctcactacacacagtgttttatggaaagaattgttagtgctatggaagagaaccctgacagaacatcatgaaagtctggaagattgcatcgttgaagattccattgttaaaggaaaagctgtgaaagccttgaaatctgaaacaataagttcttgctggagaaaactttatccagatgttgtgcaggacttcacaggatttacatttgagccaatcaagaaaatcatgacaagatattgtagatatgggaaaaaaggtatgaggggtggtgaggaaggatttcaagatgtagatatcagagaaattcaagagcaaataggtatcacaccagagaagttaacagaagatgaattgctggagatgagtgcttcaaaattagtgccagatgatgaggaaaaagacgtggaagaagcagttctagaaaacaaattgacatgagataatctggcagaatggttcccatgattccagactgtttttgacttcttttatgatgttgacccttctatcatatgggcactgaaactaaagcaaacagtggaagaaggattggtactgtatagaagaaacatttttggagaaatgaaaaagttaaaaagacagaaactatgattatgtctgtacatttacactgaatgtgcctgcctctcttgcttcctgttcttcttcctctaccttttctgcctctcccatccttgagatgaggacaactcctttctcctcctcttcagcttattcaatgagaaattgaggatgaagacctttatgatgattcatttccacttaatgaatagtaaatatattttctcttcttcatcattttcttagtaacattttcttttctctagtttattataaaaataaagtatataatacatacaacatgcaaaatatgtgtccattccctatttatattatcagtaagacttctagtcaatagtaggctaatatgttagtagctaagtttttggagagtcaaaagttatgtggattttcaactgcatggtggtggtgctcagtgcccctaaatcccatcttattcaaaggtcaactgtagactgaatgtgaaagtatggaaaaagacattccatgcaaacagaacccaaaagcaagcaaatgtagtcattcctatatcagataaaacagactttaagtaaactcatgtaaaaagagacaaagaaggtcattatacagtgataacaggatcaattcagcaagcagatataacacttataaacgtatatgtacctaatactggagcacccaggtaatcaaagcaaatattattagatttaaattgcacttaaacaggacagtaatagttgggcacttaaacacccctctaagcatcagatagatcatctatacagaaaacaaacaaagcaacattggatttaaactgcactttaatcaaactctcagcaagttaggtaagaaggaacatacctcgacacagtcaaagccgtatatgagaaaaccatagccaacattatactgaactggggaaagctgcaaacttttcctctagctctggaacaagacaagaatgaccactttctccattttttttcaggagtactagaagttttagccagataaatgatcttatataaataaaactatgaaagcttcaaaaaataaaaacctctgaactgaccgtctaattcagtaaagttgcaggatacaaaatcaacttagaaaaatcagtggtgtttctatataccaacattcaaatagcagaaaaagaaagtaagaaagcaattgcaggtacagtagctacaaaaagtaaaatacctagggaaaaatttaaccaaggaaatgaaatgtctctgcaaggaaaactataaaacactgatgtaagaaattgcagcaggcatatgcaaaaataaaaacacattgcattttcatgaattgggagaattaatatggtaaaaatggccatactacaaaaagcagtatactcattcagtgcattccctatcaaagtaccagtgtcattcatcacagaaatagaaaaaacagtcctaaaatttgcctagaaccacacaataccctggatagccaaagcaagaagaacaaagcttgagacatcacactaccggactccaaaatatactgcaaaaccatagtaaccaaatagcatagtactgtcataaaaacagatacacagaccaatggaacagaatatagaacccagaaaaataaatctcatctttatagccgactcattttcaacaaaggcaccaagaacattcactgggaaaaggacagtctcttcaataagcagacacatcacgtctcaaaagaagacatatagatggccaacaggtatatgaaaaaatactgaacatcagggaaatgcaaatcaaaaccataatgagatattatatcaacctagctagaatggctgttatcaaaaagacaaaacataggccgggcacggtggctcacgcctgtaatcccagcactttgggaggctcaggtgggcggatcacctgaggtcaggagttcgagaccagcctcaacatggagaaaccctgtctctactaaaaatacaaaattagccgagcatggtggtgcatgcctgtaatcccagctactcgggaggctgaggtaggagaattgcttgaacctgggaggcggaggttgtggtgagccgagatcatgccattgcactccagcctgggcaacaagagcaaaactctgtctcaaaacaaaacaaaacaaaaaaagacaaaacataaaaaaatgctagtgggattaagagaaaagggaaactcttacacattgtaggtgggaatgtaaattagtaaacccattaaggaggccaggcatggtggtgcacgcctgtaattccaacactttgggaggccgaggtgggcagatggcttgagctcaggagttcaagaccagcctgggcaatctggtgaaacctcatctctacaaaaaatacaaaaattagctgaggtggtggtgtgtgcctgtagtccctgctacttgggaggctgaggtgggagaatcacttgatcccagggggtcaaggctgcagcaagccaagattgcaccagtgcactgcagcctgaacgacagagcgagaccctgtctcaaaaataaaataaaagtatagccactaaggaaaaacagtatggaagttgctcaaaaactaaaaatagagctctcatattatgcagcaatcctaccacttggtatatatccagaaaaaaggaaatcagtatgttgaagatctatctgcactcccatgtttattgcaatactattcacaataaccaagaaggggaatctacctatgtgtccatcagcagatgaaagcataaagaaaatgtggtatatacacacaatagaatactcttttgcagtaacaaagaatgaaattctgttattcatggcaacatggatgagttagcttggggacattatgttaagtaaaataagccaggcataaaaagataaataccgcatgttctcacccatatgtggaagctaaaaaagttgatctcatagaagtagagtagaatagtggttactagaggcagggaagtgtggaggggaaggggagtaggtatagccaaaggttagttaacggatacaggatacaaaggtacagctagctaggatgaataagttctagtattctatagcaggactgggtgagtataatttacaaacatttattgtatattttcaaatagccgaaagagtggacttttaatgttttcaacacaaagaaatgataaatgtttaaggtgttagatatgctaattactgttctttgatcatatcacatcatatatgtgtgtggaaatacactgtatcttataaatatgtgcagttactatctgtaaactgagagtaataataaaaacccccaacacacaggtttcttttgtgcttttgtcagaaattaaaaaaggaaaagtgctataggaaaattaatctagcaaacttgcttagagtggattggaagatatgaaccagtgttgaggagggagacttgttagggttggcatttaattccaaaacgaattgtatgcactgtagacaagagatgctgataggaatataaatgcgtaaatgcatgagactttcagaaagtcatgatagtcttggtgactgtagatagggggagatatgatgactctgaagtttggcagtaaagtgacaggagatgttaatgatgcatctgaaataggaattctccaccatgagctagtttttcagggaaggcaatcactttggttttgacatgttaaatgtgtgacatggggcatctgccagacagttgggaattgttgactctttgctgtattctgcttctctggatatgcccaactttccaggggatgataggtgcagggggcacacagttcagagagcaggcttccttgattgccaagagcacatacaggatctcaggaaagtgagactctgtcctcagtgcaggattcctgttttccgttggtgtctttcaaagggtggggtggccttctgagataatgtagatatgtaacagcatggcctgtcactggcaatgacttgaccactgtctgtgagagatgcacaggacagagtacccaaaatctctcttgagagctttaacacttcatacaaaactcagatccttccctttcattcaaaacatgagatacttgtcccttccggatgtctcctcagaccttcccgcaaagtgagctaactagaccatgtgtgagcttctcctggttatggtttactttgtatttttttctcattacgttattatcatagggtgggagttccgattgtcaagacagatgcgaatgtagctttgagatggttaattctgcttggtaagatttcttttgtatttgcctttctttattcttggggttaaaagaatacaatctcatctacagttatcttgctttcatctctccttgttctgttacccagttcaagtttagactcctgcctcagatgtctgttctggctgattgacatagttgcttctgaatggactaaattactgacatcttttgcttttcctgtgtaatagtttctatttggtgattccttctcacacaacggaactgtgaggtagcctgaagcctaggggagatgtcaggtctggacacctgaaattatcatcatagagctatggaattattgatgtagagccttatatttagtcattttgaggttttcatgtgccgcttcatgtgacttctgtcattttaatcttacaaaaacccgtgaagtaagcatcttgtttgcctacagtgattgtttgaattaggttcaaaattaattgtacaaaagcctgggagtacaaatgtactttgtagtgagtacaaaaggctggaaaagaaaggcagaattactggcccaaatcacatggtaatgtagcaaaggctggttcccagcactggtagtaataacagctaattcttactgaatatttcctatgtgctgggcactgttttaagcaatttatatatattgactgacttagggtacatttgccaccgcaccggtgtgttgattggatgatagatattgcttccaagctcttgcattttgaaaggcagagaatgtgaaataagaagaacagcgggtgaaaaactaatccctgggccttcacctatcactaaaggggagtgggagaagtacaacaggccaaggaaatggagcagaatggcagccgtggcagaaccgcagctgggagagcatgttgcctgtgagccagtgagagagagggattctaaaagaaatcctttaccctgcctttcctttagttggccagactgtgctctgctcctgggcctgggcctggagttctgatcctgcttccctgccctctagcacatggatgtgctctgctcctgggcctgggcctggagttccgatcctgcttccctgccctctagcccaccgataccctcattcatccctacagagaggtggaatgatacatttcactttacttgatacttgagacgaaactagactgtttgaagaaaatcttatactgaaagaaagaaaaaataaataaaaagaaacggcttagagttacaaacctaatttaaccaaaggctagctggaaatcaactcgataagtacagtttatcgagcccttctggctggttcctgttgcccacttagatgccatttggatgcttagtgacttttctacttttagggagattcagttactcccagaacttgctcttgctttttctttggaggtatattatataaaccccctcaggtcagccccttaagcccatccctctgtttgcttcctgctcccatgctgaccccgcaccctgtgattctgattccatcccaggctcagtacatggcgaaagcagtttctcagctcaccatcaaagtgcttcttgcccagtacatgcaaccgtgttttatgccatcttgaccttgcaatttgatgctggtactttctggggttctcagtgacatggggatacaatagtgcacaaaacagatacatatcactgacttcttggacatttatttcatttgcatcagttgcactaatattttgattacattctgaatcatattatccagttgtcagtataagaatttacttaggggctgggcacggttgctcacatctgtaatcccagcactgtgggaggctgaagtggatggattatttgaggccggaagtttgagaccagcctggccaacatggtgaaaactcgtctctactaaaaatacaaaagttagccatacgtggtggtatatgcctgtaatcccagctacttgggaggctgaggtgtgagaatcgcttgaacctgagaggcagagattgcagtgagccaagatgacgccacggcactccagcctggatgacagagtgaggccctgtctcaaaaaaaaaaaaaaaagaaaattaggataatattggaaataactggaaatacccagactactcaacaatgactaaattgtattactgatgatacatcgtgtgttcattaaaaatgtttatggccaggtgcggtggctcacgcctgtaatcccagcactttgggaggctgaggcaggcagatcatgaggtcaggagatcgagaccatcctggctaacatggtgaaactccgtctttactaaaaatacaaaaaattagctgggtgtggtggcgggcgcctgtagtcccagctactcgggaggctgaggcaggagaatggcatgaacccaggaggcagagcttgcattgagccaagatagcaccactgcactccagcctgggcaacagagcgagactctgtctcaaaaaaaaaaaaaagtttatatggtttatattaatagaaaataaagtttgtgtgtgtgtgtgtgtgattgtaagtaagtgacagcaaacaatagggaaagaaagattaaaattctccaactgtgctagaaaaaaagtgcaaataatgtaaaagagtgactttgttctcttcggctcttctttatgttcacatgtgggctgccaactaaatgccccttttgtaaactttggtctgagggttgcttcttattcttttaactgtgtgttgggttaacttcctctatatgcttcaggttgcctaaactttctctatattcttcttttgtaaaaaggaatgaatactcaatatatcccaaagttagggtgaggatgtttttctcaaaaagataccagaagagagggagtggtcttacattaagttcttaaagtgttctgtattagggatcctcttttgattattttgattaacaaagaattctttggagaaaacatatgagcttgaaataactatagataatgtcagtttggaatgcttatggagatcactaaaacagggtaaaaagagggagaaaacaagttgaacacacatttagtaattctttctggggaagtgctctcggaggtgcaggtgttggatgttggataaaccagcttcttaaagatgacttttctaggtcatacatgcagtaagtgatgttcagatcactgctagtgaatggatactgtaggttaggatagaacttccatcacacatttaaaaaattgctgtatctcaaataacttagaactgaagatgcaagataaggagactgtagtcgtagcaaagatccttatgacaaattacacatgaaaatcttgaacaaaatcatttcctgaagtggaagcgaacgaaaacgcatttatttattgttttaatgtattatgtgattttatatatgcaaattaacataataaaatattataaggagccatttgattatttcatccatcctaaaaatttaaatattcaatatggccaataactttttgccccattggaatttatagagtacctaacagttacttagagttgccttatatttaggtatacctgatatctacctggtagggaggtttttaaggattaaatgaaacaattaattgggtgtgtgtgatgtagcaagcattatccatagtaagctctgggttaacagggactgacagagacctgctgtgagatctgcttcctgctcttttttgatctttcctttctatcacaggctgggttaggacacagaaactggtagagagtttcttagaaagtgacaggggaggcctgagaggtgaaaagcatcttgcttggtccctggaagacaggaatctcaaaatgttcattgtgactttctgccactcgaccccttttctctttgttccccctcccccacccttacccccagtgcagtttgcagcacagggaacacacatcacttctgtgctgagagggatcacactcagtaactcaagacaatgagcttagctactttgttcatctgtgaagtagctctaggacaattatagaggtttgcaggtgacttgtaattacctctttattacatgtaatgtttccagcatacaaaccttttatactgtatgtttcccaacgagcttaccgggagggtcgtatgtataccctttataagttaaatttcacttttgaggttttgttttcttttcaaaacagcgtattagagtacagagctctggcgtgactatcattattgacaggttttggcttttcacctctctcctctcggctcacttggatttatttcacataatatcttcttggaattctgattttctctctagattaagcttgaacatttagatgtacctggtaatggagacaacagactaaaatacaaaaactcaatttttataagccttaaattggcattgaatttttttttcaagatctaagaaccagactgaaaaagtattaaattgagctaggaaaactgatttcttgtttactggaacttgttcaatgaaggaaaagttactttacataaggaattattgttaccagttcctccagtaatcttattgtctcctacgtggatcccgtgctttaaaaaaaggtaacaataaaacagaggatgttatgataataaaactcgatatcatgcagtcagtcttgatttgtgaaaaagttgtatttctaaaaatcttatatcaggttgggcaataatagcttgcttgcctgtttatattactttatttgaaattttttagaaataacacattatatcaaataaaaatttattacctatagtttgtcatttccaaactaaactttggaaagcactagtgactttcgagtctggaaatacattgtgcatttgaaattttgttcctgataattagtgagtaatcatttgttcctcccaaaattttgttctaaaatttgtacatggggtttttaaaaattcaggtatggggagacatccagacatggaaatgactgttatgaaagaggtttatgcttacagatccttagacacaggaggctcagtacattgcacgggatcacagggaaacaccaggttgggatgggagccggagatgggagatgggggagcatggcccagagcctttattgtttgtttgtttgtttgttttttcagaagggaacgggcaagacagggtagccaagctgggtaagtttaagattggctagtttgaataattttggcaggctttgggctatagggatggcccccagttgtccaggacctgggcctgggtgatttaggatgggggaatattacctgctgtggctctggattggttggtttgtatatcacaggcacgctcgcacaggggtgttttctgtctctaggaattagccagcccagggaggaacagtctctccacagtcaaggccccaaatacgggagtatcaagaacacagataataagagaatataatcaatacaaacaaaacaaaacaattgaggagttgaagatggcactgctaagcaggtgctgtttttgtgcatgtttttaagagatggtgctgtaaaagactagagaacatgtaagtaatttatttctgagctttacgttttgaaatggtgttttagggggttagtcaaagtaagtgttaactaaagcctaatgcgatatgctatagacatttggaaaacttgaattcagtaacctgacccgtgtaaatttctcccccatgtgaagatggtgggtgggggtgggaggtctgtggtgggtaaggggtgctttcagctttgccccgctagcttatgggatgctcacaattcctcagggctgcttcacttccagctccatcttctgaattccaggcataaggaagagggagaacaaaagggcgcttaccactctttcctccccttggaaggagcggtcttagaaggcttgcccaacaaatccagcttacatctcatagggaattggtgattcacggactggttagtgcttgtatgaagccagcaaaggttgtcctttctgctgttgaaaccaactcaaaaaatagctcttctttgagaggattttgaaaagggaagaagtgggtagttttataaaaaatgtaattctactaaaagtcatagtgattatagtatcagtaataaaaccttgagcttttattctatactggttgctactctgagtgctttatgtatttctatgtacagttcatttagtcctcagaaaaccccattattattcccgtttttttttttcagatggaaattgaggctcacagaggttaaataacttgctcaaggtaacataattggaaagtgacggaatccagattaatagccgagattgtttgctttaaccacgtggttatactgatctgtaatttaaacatctctagctcagagataaggaagctaaagctggaaagttttaaggcattggcccaaggtcatgccggtagtcggcactgagcttctgtttctgggtgtatttccactaccctggtgctgtctctaggtgcacactctcatctatatcctcttatatttgggccaggcttcttgagaggtggatatttttggcttgcgatggttctgaatcctgaaaattatattctttctttagacttcttttacttggcaaggaatccccctggaggcactttagcttaggggtagggagggtggactttagaggcacattgcctgtgtttgaatcgtggttgtgccagcgttagccgtgtgatcttggacaagtcacacacctctcttgagttttagtagtttcatctataaaatgggttaatcatagtagccatcccacagggctgctggtagaaatagatgaattaatacaataaaactgcttagtatagtgcctggcacataagtaaatactttctatcctgcttatattattacttatcagaaacgttctccaaattaaactgaacacatttttcagcaccctgtttggcactcagtaaatgtatatggaatgaataaaagcaactgtgaagtggtttgtattgtcagcccatgcatcctcatactggttggaaatattagggttacagaagattggaatcttcatgttatttttaatatttgtattaatagccattatcactattaagtatcaataatattacaatatcttactcatcttctgctactttccacctcacttcacttttctcatgtataaacctattagtttttacatttggtgcttttatactgagactgtgttgaaagacattgtatacatacaaggtactgtaagtgatataaaagtttatggcttcatatttaaaaatggatgttactggttttgagtcttctcatgtcacatttccaagtaacagcaatcacccattaaatattaatttaatcacaggaacaagatacaatcgtcactaaaatgactttaaatggtagcatcactaagcagtgagataaggactggcaaagcaggatttgtgtcattctgtggcagcttttaaacaatgtgtttgcatttcccttgtccgttaaaataatacaagaattaaacccttttaaagagaacctacccatctctttcccatgtgtcattcttgcatcagagaaaatgctgcataatactaagatgacagccccacctctgatgtcacccaggatggtacaatcctctccaagcctttgctgggcttcctgctgctgcactgggggacatggttacattaaagctaactcccgtcatctcaattatctccttggaagtagttttcacaaatataaaaacgccctacggtggctgttttcggtaagctaccaaggtagagagcggcagaggcagacagggagagcaaacgggagaacaggctgcttccgcctttgtgagagggactgaggcagcagctcctctcggctcgggttccaagtgctcaaagtgcttccatttccatcaccgtgtgcagtgcagggcaaaaggggctgccaggaaatctgaaactaatttgcttccagttgactagaacagcatattttgaattagcttgcttctttttaagctaacttttctcaagcgttaaactgatgaactgggcattttctatgatcaatgggtaactgctggagctacagtaatctctgtgagtaacctctatttgtaggtctatgcaggcaaatatatttttatatatctatttcttttaaatgctgctgtgaaagtatccgtctgtattattgactgcttttgcttactagtcttgtctttcgagcgtcccagtaggagacccctggggctagaccaggttctgctgaatccagacatagaggagagcattttgcatttattcggggatgcccgcgccaaccattctttaattcccagtcatcagagagatgccggctgccctctgaatgcctatgcccagcacctcacctggctttacctggaatgttgatttcagcatgtgacattgagtttttcaaaatttttatttttatatagaaagcaaaatattattcttacctgtaatcttacttcttttcttttttttttccccacaagctttcctgggaacacacaattctgtcaccctatgtctgctccctgtttgtgatatattatatagacagaaagagagaaaacaggctacccctccagttttagaaagacataatgttgtagtgctggatgggaataggggaggagtttctcttaaagagctcaaactgctttccatctgtgtgcctgaagtacagcttagtatctgaatagccttgaagggaacaaggttagctcaaaggtagcaccaaaaatgttctggaaacacgctagttgaggctgagatagaatctttactggaagtttgtaacaggtatctcagtttacacacaaggatgtgtttttcctgtttgttaaaagtgtcgcttttatagtaattcaagatttatttctctctcaccatggaaactgactttcaactctctgcaaaatttgcatttctagatatacttgggacaattgtttatgtcagattgtagcctgaatccttagtgaaactgtgggtctcttattgagcatgaaaactactggctgcaaatgtggatcagctgagtcctgagtctgctacacactggaggctgagtgaggtggcgtgtttaccactgcacctaacatctgtcttcatagacagaagtttaaagaagtccacagctgtagttgatcatcactgtgaagaactccagctgcttggcattcatgattattttttaaaagaattgtatggttttttgaaacatcaaattcttaaatgtcccaatatttcctacatatatacgaaacagtttatattaatcttaccatatatgtgttaattttagcagaagaaagcttgctgtgagcgagactgtggggttatttaaaagtttagtttaaacttttttttgtcttttaaaaataaaattaaaactaaagagtcagtaaagagagaaattttacaattggatttttaaaagtatggattccccaacagaaaggatcgtagaaagtggacagaatggatgaaatcagaggggcatccctgatcagaaggtaaaaggctgaaaggagaagcacaagatgtggatataaaaaaccagaagttatgacaaagagaggcagacaagagtggagaaccccactggttgaaaaaggaaaccagctttgaaaaacggcaattttaaagatgagctcaaattcagctcttacagcttagtgtttcttctctgtaacaggtaacagtgctctgcacagttgcagagactacggtttaaaattaatgggctgttccctgtctcactcaagcttccctttggtatgctgtatgcggtgccactccttagctcacagagctgcctctgaaattgactgaatggtaaactagtatcatttctctagggattagagctgaataagaaaaattgggttctgaatcattagtatgtgaaatttagtttgccgtaagcacagctgtaactattaatcacttggggaaagagtgtccaattaatggaatattttctgttcgtgtgcacacgttagaagcttgtgtagtggttggcaggtcttttcctgtttttttttatttttttcctaacacataaacaacttaaatatctgtgcctttagcattatcagtgtccaggcaatagccagcatcctggattacataccgtagttttcttcaaaatgtgacttttcttagggtgaagagagtgtcttaaaatataatgtatttagattactcatttagtaattctcattactcatattcatttttccgttatttttatcataccaaatttattttctattgctgggcaaaatgggttagattatcctcttgttttattttaatacaaattttactattgcattgcaaatttgagtcatgtatcactgtgttgctggtgaagtttattgattattaaacgtaaaaatgttgataattattacagttaaggattatagttacttataaatgaaatgcatttgagattttttttttaactctgcaaggcttgctctttatatttgttttgtaaattaagcatttatcttccaatcttacagatttatgaaatttcacactaagggatcagagtggtcactctttttcctgccctcgtctttggaactgaattcctttctgacaagtgaggggaatgtgattttaagcttgcttctataaattttcaagtgttaaaatagcttactaatttatagttttcttgtactaacataatattaatatgttttaaggtgtttactaactggtattcattagggaacagagaacaccaaagatgttattgcatttatgaatatcacatgtagaaaggagggaaaacagattattagtggctgggttagccataatttataaaggattgaaaatccgatgaactatagtcataggaaatagattataagacccttagtgcattctccatagtatcttatcagactgaatttccccgtacatttctattttaaaagcaacgcatccaaagatatgaacattaaaaaccttgggaaaatattctggtttttaaaaattggaaagtccttacccttccctgagcccatttctttaagctccaaagtaatttttttaaggctgtgtacaaataataatatacaggttttgactaatggtcaagtttacatttgcagttattttaggatctttttgtgtaagtagagagtcattggccattcattgtgagagaaatttactatgagctgtaaaatcaagaaggggtcatattacagcagaggcaattctcttcctctcttggaaagggaccggggttacttggtaatttgagggtaaacccagaccagaatgatcaagtgtttctctttgcagtaatgagattgttttcttggaacttactttagttgatgtctatttgattgaacagttggacctctgagttaggaggcaggcagttatgatctcttttaaaataaaaaagtaggcattaaatgtaatcagaatgacttgtagatattgttgtagttttctggaggtgtgtttctcatcctgtaacgtgtatacaaatcctctgggattctcgttagaaaccaacaggattctgattgggaatgtctgaggtggtgcctgagagtctgaatttctaacaagcctccttggtgatatctatgctgctttctcaagaccacactgagtagaaaggctctagggcagcactttcaaatagagctttctgtgatgacggaaatgttctctgtgtatagacagatacagaaatatacaggtatctatacagacatacatactccactatacagatatatggatatctgtgtgtgtgtgcgtgcgtgtgtgtgtgtgtgtgtatatatatctacataagctatatatatgtatatatatatccatatatctgtatagtggagtatggtaggtattagctatatatggtatggagcactaaggaactacaatttcaattttattaaattttaagtaacttaaatgtaaatgtaaataggcttctgtggatatggctaccaaattggacaacacagtgttagagagaaatccattgagaaatttatacttaatggtatcagctcatgtaggatcatgctgaattctagaataggctgagattatctccactgaaatttaccactgcctgaactttgtttgcgagcagacagtatatatagatggagctgctggattgtaagctccttgatgacagaggccaagttgctcttgtttgttgcccttttctctgctgcttgatgcattcatggtccacaagaaatgttggctgagtaaatgagagaatgaactggctctaatatcaggaagcgccctactgtttcctgaatccttttcaagcctggacttagaagcaacgggtaggacttgggtgacactaacatatagtgttttgcttatgtttaaggaggctgcttttttgcttctgtcttaaggttttttgtttgtttgtttgtttgtttgttgagacagaatcttgctgtgttgtcccggctagagggcagtggcacaatcacagttcactgcagcctcaacctcccaggctcaagcagtcctctcacctcagcctcccaagtagctgggagcacaggcacacaccaccacacctggctaagtttttaaattttttgtagaggaggggtctccctgtttgcccaggatggtcttgaactcctgagctcaagtgaacctcctgcctcaagctcccaaagggttgggattacaggcgtgagccacctcatctggctttcaccttctattaattggtatcctattggttctgggacattcataattgattgcttcaacaaaaatacccattttgctaggtaaaattgttataggctctggagatataattgtaaagaaagcaaataaagttcttgccttttagagtttatatttttgtggcaacaaaacaatacaagacaaaacaaaaaccttttactaaaaaatggcatgactgatcccaggttctagaaaatatatgtgtgtagaatccgtaactgtggctctcctgaggaacctaggcatagatgtgactgccatatagtctggggaaacgtatgtcctgttgctgagaatcccgcatgaaaacggttttatctggttcaaatttcagcttacagtgaccgagtctacggtagatgtggcaaatagttcttatattttgtttttcttgaactattgtcttttcaggagtttgctagccagagtggaagaaaaccagtttgatttactgctcctcaaacaggataattcttagaaagaccctggtttttctgcagccgatcttatggaacaggcttattttctcacaatttgaagaaatttctttctatttcatttcattttattacagctctgtccctgtgttccagaaacagatgactacttaatatataacccaaagcactcctaaaattcatcttaacattcaaatgtatctcatttctttctcaatatactaaatcaaaagaaaaaaggtctttaaaaaatcagtgggtttatatgtcattgcaggaaaagcatctttgctaaacaacaggaaacacgatttgttaggaatctaaccagatacacaaagccgcagataaagtctctgatagaaaagtatgacttctaatggactgtaaatagatacctccaaaaagtacctgtatttcacatgaatgtgaaaactcttctctcttccctcctccacactctacactacattttcatttctttaaggggaaaaatacacgcagtaaagtatgaactctttattaattcacattctactagtgtgtggtttatatttaggtaagtgctaaagttctttttttatatttaacaagtccctgagtccctttgtcacacatacaagaccaaattcaggtaggactaattcaggaaggctcgctggaggggaaatgttttcagtggattcttacattagtaatagatgtagactgaaagggaaagtgttaacaagtttcaagtttggtgtaagagctcacagcagttggaagaagccatgttgaaactagaggggcctggggcagaggagatgaggagatgatgggcatggatgccggtccaagtagagtgtcgtgggagatgcagcaccccttgcatctttgttcctgtctattctgcctttgttctggctctagcactcaccgtctctcacctgtactattgtcagaagcctgcgtggttattcctgagtctatgcttgtgccctctctgctacacatccttcacattccaccaaggcgagctttctaacatgccaaacagacttttcatgttctggaaatactcagttttgaatcccctgtgtttagtacatagcaggtaatcaatatttgctgaatgcgtgaatgaattttggaaacaatgggcatttaataggaagtatctaaggccctattttacaagggagcagcttaaaaaatcttaaaacaataatttggtctttttttaaaaaaataattatcttagcatatagtcccaatttttaaacagaaggaataaatcagaaattctaaataaaaggtcaggattaacaacacagtcaagttgtgataaccaatgcaaacagcaaaaataaactgctcatggggtgtggcagagggtgccttatttgaaaggaaattcttgctgttatgctgaatccttagggacatgataattaaggctgtttctacccagaagctacaactagaacacttctggttttattcttcattatatttgttaacattactgctcttagcaatgatggtcttggctaaatgcgttagttcacgccgtaatcccagcactttgggaggccaagggtgggaggatcacttgagcccaggagttcgagaccagtctgggcaacatagggaaaccccgtctctacaaaaaaataaaaataaaaaaattagccgggtgagatggcacatgcctgtggttccagctactccagaggctgaggctggaggatcacttaagcaccggaggaggctgagctgcagtgagctatgatggtgccactgcaccccagctgggtgtcagagtgagaccctatctcagaaaagaaaaaaaaagcaatgatgaatgatgatctctcacggttcagtgtccctgagtttctcccaggcttttactcctgagagacagaagactagaaatttagtcctgacttagagttctaaaacaatactttattgaacatcattttattgaccttggtcaggtcctttcgcctctcagaacatttgtctccccccgtctgttccagttcttagaacagtaaacacagaccacgagaaactactccagtatttaatagtaaagcaagcaatctgtcacgcagggctttgccttgccctgtctccctcttatctgacctcgttttctttgaccggttgccaagttgttatatcagacatcacaagcacttgcccacaattgttgaatttgctgcccctttctgagggacatttcaatgaaaactattaaaaatggggtgaaggaattatcagaattctctgaggccccttgatatcttttggtcacttctcttggggccagtgttcagttgtgtgtgcgtgtgtgtgtgtgtgtgtgtgtgtgtgtgtgtgtgtttgtgtgtgtgtgtttgtttgtttgttttttccagagggcagttgaaactgttaaagcaaagcgggctcccaagtgtctaagtttaacttttcttccctttgttgaatggatttcactgttatatgttttggtgcagtttataaatacagcttcagcagtcactatggtcaattttcttaaaacacttcatgatgggttaaacattattgcctttggaagctttaaggcgtgagtaacattatgcttatttgttttgtatatttacactatatataccataccgcaaaagtctttttgacatttatttatacagaggagaggacttttttcaagagttggtgagcaagggaaggcttaattaaggacaggggatttggtttaggtgttgaaatgtgaaaataatctgatttatgttgaaatgagaagaaaaagtatgtcaggtagagaaaggaagttgaacaaaggcaaaggagcgtgtgtatgtctatgcattcagaatgtatgtatgcttaagcttatttccagtgtgtattaggattagaacaaatcttttcagggtattcatgggctgcctcctacttcagtgtagaggcaatggtataacatgtgaaagggggttgacagagacttgattagaaagatggattgggattgtaaaggaagaagtaaagcttttatccacagatgacatgatctggtatgtagaatcctgaggaatctacaaatatgttattatatgctccaagttaagcaaggttgtaggatataagattcacatacagcaacaaattgaatttctatgcatggctactgaatgatctaaagaaatttgaaaagcaatatcaaaagaaatagaatcttaggggaataaattgaaaatctgtacatttaaaattataaaaaaaaatggctaaaagaaattaaagaagattaagtaagtgaaaagacagcccatggtcatggaacgaaagatgtaatagtaatactgttaagaagccagtactgtatagattcattgcagcccctatcaaaatcacagctttctgacgagttgattctaaaagtaatgggaaattcaaggggccaagagtgaccaaaacaacctgaaaaaggaagaacaaggttggaggagactcacacttccagatttcacttactgcaaagctacaatagtgaagacagtgttattctggcataaagataggcatctagccaggtgtggtgctacatgcctgtaatcctgacactggaaggctgaggcgggagggatcacttgagcctaggagttcaagaccagcctgggcaatgtagtgagaccctgtctcttaaaaaaaatgaaaaattgtccaggcatggtggtgcatgcgtatagccccagctactcggaagtctgaggtgggaggatcgcttgagtccaggaggtcaacactgcagtgaactgtgattgcaccaccgtactccagccagggcgacagagtgagatcctgtcaaaaagaaaaaaaaaaaaaaaagataggcatctagctcaatggacttgagagtccagaaataaacctttgcatatatattaatatatgtatatgtttgatttttgacatgggcaccaaggctttttgatgggtaaagaatagtcttttcaacagatagctctgggacaactggatatccacatacaaaataatgaagttggatttctacttcacatcatgtacgaaaatgaattgaaagtggatgagagagctaaatgtaatagcaaatactgcaaaactcttagaagacaacgtaaaagtaatctttgtgacgttggtttagacaatgatttgctacatatgatacaaaaagcacaagagaccaaaggaaaaacggataatttggatttcagcaaaagtaaaaacgtttgtgcttcagaagacactgtcaattaagtgaaaaatgaccactcacagaatggtagaaaacatttgcaaagtgtacatctaataaagaacttatgtccagaatatataaagaactcttagaactcagtaataaaaagacaaataattcagccatcaaatgggcatgtctctaaaaaagatgcacaaatggccaaaaaacacatgacaaggtgctcaacataattagtcattagggaaatgcaaatgagaatcacagtgagataccacttctaggatgtctgtaacaataaacagacaataatagaatcttagacattgcttgtaggaatgtaaatagtgcatttgctttggaaaactgttcagcagtttcttaaaatattagacataggtttactatatgatccagaaatttcactcctaggtatatatagaagagaataacaaatatatttaggccagatgcggtggttcatgtctgtaatgccagcgctttaggaggccgaggcaggcgtatcctttgagcccaggagttcaagactagcctgggcaacatggtggaaccccatctctgccaaaagaaaaaaaaagaaaaattagctgggcatggtggtgcatgcctgtgcctatagtcccagctactcaggaggctgaggtgggagaatggcttgagcccaggaggtcagggctgcagtgagccatgatcgtcccactgcactccagcctgggtgacagagtgagaccctgtctcaaaaaaaggaagaaaagaaaaaatgtatttagaccctgaaacttatatacacattttttattcatagcagccaacaagttgaaacaactccaatatctcatcaactgatgaatggccaaagaaaagactgctcccgtatgatgaaacattatttggcaataataaagaatgaagttctcagccaggctcagtggcgcatacctgtagtccagctacttgggaggctgaactgggaggtttgcttgagatcaggagtttgagaccagcctgggaaccatagagagaccctgtctctctttacatgtaaaaaataataaaataaaaggaatgaagttttgatagatgatatgacatgagtacacctgacaaccttgtgccaggtgaaagaagtcagaccccaaatgccatatattgtatgattgcatttatatgaagtgtccaggatagaccatttcatagagatagaaagtatattggtagttaccaggggctgagaaaagctgaaatggggattggctgcttatggatacagggtttctttttgggagtgataaaaatgttctggaatggccaggcgccatggctcacgcctgtaatcccagcactttgggaggcctaggcgggcggatcacaaggtcaggagatcgagaccatcctggctaacactgtgaaaccccgtctctactaaaaaaatacaaaaaattagccaggcatggtgatgggcacctgtatcccagctcctcgggaggctgaggcaggagaatggcgtgtatccaggaggcggagcttgcagtgagccgagatcgcgccactgcactccagcctgggtgacggagcaagactccatctcaaaaaaaaaaaaagttctagaattagatagtggtgatagttgtacagttttgtgaatatactaaaaatgcctgaatcttaaaaggtggaaccatgaaaagacctactgccttctttactgaaagacataaaatatcaatattccaccctaggaagaaggctctttattgtttttagctatcatctttttcaattcattgtttgaaaagtcacttcctcttcagatgtaagcaagctacattttattagttctgtcttgtagaaggtgttataaatactatcccagagaagtgcttgttagattccatcaacacttgattcagatttaattttaagaatatatttcaggccaggcatggtggctcatgtgtgtaatcccaaggtcaaggcgagaggatcatttgaggccaggagtttgaaaccagcctgggcaacacagtgagaccccatctctacaaaaagtaaaaacgttagctggacatgatggtgcatgcctgttgtggtcccagctacccgagaggctggagtgagaggatcacttgagccgaggagttcgaggctgcggtgagctatgttcgcactcccacactccagtctggatgatagagtaagatcctgtctttaaaaaagagaaaaaagtgtatatatttcaaattattttacaacatggaatatgaaacagcatgtactctcagaggtattgctatttaacacactgggggataccgtgtgttcaatagcaatacacctattattagtaattgtatcagtaattaataattatcagttattaggataactgatgtttccaagttaccttggaaatcaaatttttttttttttttttttttttgagatggagtcttgctctgtcacccaggctggactacaatggtgcaatctcggctcactgcaacctctgcctcccaggttcaaatgattctcgtgcctcagcctcccaagtagctgggattacaggcagaatcaagtcttttcagccatttcagtgtatatatatacacagacatttataaaatatttcactaaataggaaggttgtagctctgcagtagtttaaaaatggtaacaatggccaggtgcgatggctcatgactgtaatcccagcattttgggaggccgaggcaggtggatcacgaggtcaagacatcgagaccatcctggccaacatgatgaaaccccgtctctacttaaaacaaaaaacaaaaattagctgggcatggtggcacgcacctgtagtcccagctactctggagactggggcagaagaatcacttgaacccgggaggtagaggttgcagtgaaccgagatcgtaccactacactccagcctggaaacagagtgagactccatctcaataaataaataaaataaaataaaataaaataaaaatggtaacaactaatgtcctctttcataaagtaaaagtgagtacactgtatttccagcatagatgagggttttcatgatacaaagtaaccaaaactaagttcagaagaagactggatactagggctgataggactacagctgctatctgtaaacccccaattgaaagttttggtttgtcagaatgtccccattttcagttctcactggctatcattttaacaagaaaatattataaatttggttcaatatagtgaatatatactaatactgtttacttcgtgtattggggttcttcgtaagatgccattacaattttatgcaggtagtgatcttactaatatgtagaatctaaaatgttgagctcttggaagcagaaactagaatgatggttaccagggactggtgggtggtgggattggggaggtgctggtcaaaggatacaaaattgcagataggtaggaggaataaattcaggaggtctgttgtagaacatggtgactatagttaataacaatgtattgtatacttgaaaattgctagaagagtaagtagattttaaatgttttcactacacaccaaaaatttgaggtacagtactggtatgttgttaattagcttgatttagctagtctacaaaggtacgcatatattaaacattatgttgtatactatatatatataaactttatatatgtaaacatatatctagatatataaacaaacttttgtcaattgggaaaataaatgaataaaatgagaaaaatgaattttccgtagttgggttcctggaagtctttctcaacacactaagtttctcattccatgttggcttcattcttatttttcagggatgttttgaaagcattttttccctccacagaaacccaacaatgaaggggagacttctggcagaaaaaacatattgactgagtttaaatagatcataagcattttgcagaggctctgtctcggagcttgcactgcacagatactgttggctagatcatagggctctttagtgttaagcccaatatacacattttagttgctgtttcatgagtggtatttggaagttggtacatatccttattgtaacccctttttgcatatgaagcaactgaggttctgaatcctcatgtatgggacatcagaagcaaagttaaatatggcaggtgtcattagattgccttctaggccgaaagttttgtggttatactcgcgtaggctgagtagaagggatcactgtagtgtcatgaggagtgtgtgttacagggtggtgggaggactgatataatgcaataatcaagttaataagtattattgagtgcctaatctgtgtgaatatgcattattacctactgggccctgtctttctacaacaagtcatatgtccattgtgttctcttcacaggtgatcatggaggaagcactttactcccaccaaatgtcacaaatgaatttccagaatatgggaccatggaggaaggtggagaaggcctaagggcttctctggaatttgatggtgaggctctgccatgccacccacaagagcagcagggtgtccagcctcttactggctgccactctgggctcgacagtgttacagaaggaccaaaagatgtcagagaggccccctctcaaagtcatctcaaggaacaaagtttacagcccattgactctttgatttcagctctgaaagccacagaagccagaatcatttccggaacattacaggctacaaaggtactggaccaagatgctgtttctagtttttcagttcagcaggtggaaaaagagctggacactgccagtcgtaaaacacagagagtcaacaaaacgctccctgctggccaaaaaaatttaccagaaatacctctttcagctgaagtaacaacggaggaaagtttttatttgagcatccagaaagatctcaccgcgctgttaactggagacactcaggcagagatttcccagataatgaataatgggaggaaaggggctgtctgtgtgcaggagccatcttgtcctttggcctccctcgggagctcagcagtgacctgccactctgcaggcagtgttggtttcttgaaagagcagaggtctgctcttgggagagagcacccagggggatgtgatcgaagcagctccatgggacgcccaggccgggtcaaacatgtggaatttcaaggagtggaaatactgtggacaggaggagacaagagagagacccagcatcctatagattttgagacatcactgcaaagaacagcctctcctgacagcaaagagtcttccaaagtgccacgccatctcatctcatcagctggtttgtgtaattcaagtagtttaactgagaatgtttgggatgaatcctggaaagctccttcagagaggcctggcactagctcggggacattttcccctgtgcgtcttgatgagagtggagaggatgaagtcttcctacaggaaaacaaacagcatcttgagaagacacctaaaccagagagagacagggaaaggtgagctcccatagtagccctgctgtctcagatgcctggtacatatcatagaaaactgttatcctgtacttgatatgagaactcaatcacaataccttgggttcttgttatcatggaatataagatgagttactgtgagctaggtccttctaagctaagattcctcctaagcttctcagatattaaagtgatcttgttataaagtcatccgttaggcatggaccagggaaacagagttctgaagagactgtgaacactaaactgtgaattcttttctgacattttcttaacatttgacagatttcaagtttcccaacgtcaaggtaactaacataccccacagtcatctttagtaatatgaaaaggtttggactcttttgacacaccctatatagctggtacttccaaccttggcatttcttctgggtataacaccaatgccttcagtccagccgacatacatgtatgaacacagaggttcttggcccactcaatttcctatgtttgtttgtttatttatttatacagagacagggtcttgttctgtcccccgggccggagtatggtggtgtgatcacggctcactgcggccttgaccttccaggctcaagagatcctcccacctcagccctctgagtagctgggactacaggtgtgcaccaccacacctggccaacttttgtactctttgtagagatggggtcccactttgttgcccaggctgtttcaaactcctcgcatcaagtgatcctcccaccttggcctccctaagtggtgggattacaggtgtgagccactgtgccgggcccttcctatgttttgaaatgacatctcagggggtcagaagtagattttataattcagttgttccctggtattcacatgggaatttcttcttctcacaagtagcatatattttgatttatggccttttttttttttgtaaattatactttaggttctggggtacatgtgcagaacgtgcaggtttgttacataagtatacatgtgccatggtggtttgctgcacccatcaacccgtcatctacattaggtatttctcctaatgccatccctcccttagcccccaacaccccgacagggcccggtgggtgatattcccctccctgtgcccatatgttctcattgtttaactcctacttatgagatttatggcctttatgattgaaacttgacatcatgtggtatttcctggtctttccctgcatttctgacatctacaccagcttagaccctggataaatggcagacgtgacccatctttctgcactccctttgatcgtagtcatttgttgtgtactgtacttctaattggtaccatcttttcttctgtcagccctcatgacaccacattttatagtttatacgggagagcatctgtgtcaaggccgagggttgttttttgtttttttgttcggtgtaaggaaatgccttttcctctgcagttaaaaaacccactgagagtggtgctcctttgggatcactggcaggatccttcccactcccctccccaacccatcagctctccagacttccctccaaagcggccttgatatgtggcatgtggcccagtgtttatattcccactggaatatgcacttttactgttgttcagattaataattcattcctcttttcttcccacaaatattttcaattgtctcctatgtcctgacactgcaagatgctgggcgtaaaggaatggtcaaaatagatgtggctcacggatactgtcctcatggaatttaccactgaagataaacattgatcacataaacatgctaataggtataggatcacaaagtgtgctaggttctgtgaaggaaagaacagagacctacaagaatgaataatttggatggagggaagaggccagtttagttgatggcttggacaaagcttttctgtggaaatggaaattacactgagacgtgaggaaggaaagagtttgccagccagagaaggggtaggaagaatgttccagctagagggaacagcatgtgcacaggaggctgctgagctccctgactagtgtgtgcttcctgcagatgtgtgaagccaaggcctgtgccaggcttgaagatttgaaactctccctgtgtggctaatgcctgaagagcaggggaggcttggcatggtggctcacacctgtaatcccagcactttgggaggccgaggcaggcagatcacccgaggtcaggagtttgagaccagcctggctaactccatctccaataaaaatacaaaattagccaggcgttgtgttacatgcctgtaatcccagctgcttgagagtctgaggcaggagagtcacttgaacctgggaggcggaggctgcagtgagccgagattgcaccaatgcaccccagcctaggtgatagagttagactgcatctcaaaaaaaaaaaaaaaaagcaggggagagtggggtgcagtgagtgtggagaggtagggaggagcatcatcttaggaacggtccagtttatgccaagtgcagtggaaagccattaagaacaagcatttggtcccatgggtgaccttcagtatttaaaaacaacaaaccaattgcaatgctgaatgtggattccagtaatacctgggaatgtggatgacttatgagatgcttaatagataattcctaattctatgttattcctatttgtaggaatctgaggctcagagaggttaagtaaagttgcttcaagtgatatagctagtaattgagacagccaaaattcagcttctggtttttctaactcttgacctcttgctcttagtagtgatctatctcccaagtttttaattttacttagttatcctaatgttcgtttttaatatttgtagaacatgctgcatattaattgttcacgtttgtgtgccaaagtgaatgccctaccctgtatgttgacttttgagctgtttctaatctctcaaagctttggttagccttgcttctgttgcctttttgttaggccgttaattggctatctaattttggacgtgaaatctctctgcagtgctgctctgttgtcagcagggggcagctcttggcttctgatgcagtcatctgcttgagagcatttggccttatttaaatcagaaagtattaatcaactgatgaaagtttggtgtatttttactgaaattttgccgtatcaagtttccatgatatatttatctgcttctgttataattaggaatgctggtagttgcaaataatctgaatgtgtacggtatatttggctaaaatgagaattgaatattttattcatatcttcattggaccagatgtattcacacattaggaaactagtttgaaactttattaaagtatttatagtgtcctagccacatgcatgccaagaatttttcaacctgattatatttcatagcttccttcccaaatatgttaagatataagtcaatgaatagaagagttagatcttcagaatgttgtcctttttatatggttgaagtgggagaaataaagacattaacctaatattggaattcttcactcttatttactttccaggatcagcgaacaagaggagcacgttaagggggaagatgaagacatccttgggcctggatatacggaggactccaccgacgtgtacagctcccagtttgaaaccattttggacaacacttctttatactacagtgcagagtccctggagacattatactcagagcctgatagctattttagctttgaaatgcccctcactccaatgatacaacagcgcattaaagaaggtggtcagttcttggagaggacatcagggggaggacatcaggatatcctgagtgtgtctgcagatggtggcatcgtgatgggctattctagtggcgtcaccaatgggctgaatgatgccagcgactccatctacacgaaaggcaccccggagattgctttctggggaaggtactcgtcccattctcattcatttcatgctggtggtttttgtaggatttcttttctgggaaatctgagtgtggaatatatatttaaatcatttggccaatttctgtggacataagcaaatgatgtgagtaaaaagtaatttgagttttagggcaggaaagacacaccttagtggtttgtcacattggcacactgtgatcattttagtctgtgggatttcctggatgactatatataaattggataccaaacaaatatttggggatgatgagtgaggttatcagctccgatgatggcagagacgtggtgctgtgaaacgaacactgagagatcgtagctttagtctggcactgagggtggttgaagacttcaagaagattgtttgattagctcagagattccttcattggaaattaaagtggtggactatacagtcagcaaagtctcttccagccctttgctctgagagttcctgttctgtcttcctgttcctgacgtgttgaaggaaggatccgattagacagatgcttgagagagctgatatcttggtctaggctccgtatttattttctctctctactttaggatttttaatctatctgggagataaaatgacaaattatgtacattgtatccaccatgcctgttatttggggattccgcgactatttatggattatccagcgtttcatttcttcatgctcgtcatcctcaggttatctacctgtgacaattttatgaattttgttttggtatatgtgtgtgtgtgtgtgtgtgtgtatgtatgtatgtttgtgtggagctggtgggaggtgttaaatggtgatcaactattttaaagctgtttaaagctgtattaaataataccagtgttttttgttaaaaaaaaaaaaagccagtattaatattacaggttttcaatggacctctctttttgagcagtctgccctgtgctgagcattttctataaccagtttgaaggtttatagttcattagatgagcaaattcaggattggctccttgtgacattgtagctatgcattttcttgtgaatatggattgtggatattggttgtcttactgggtcacagtgagaataaaaagaacaaggtgtcaaaaccacaagactttggtctgaagtacttgggcaagccacttacgttctctgaaactggatttatttatttgcgaaatggggttaatgatccagtgtgttgtgaggctgtgagatttaaagggttaatagagactaaagcacctcgcacaggacatggtacaaagcagagcctgggtaagtgtgtgcatatgaactggttgcctggttagtccacatctagacttcttgtatctctgagatcagagtgtctctcagtggaagagtactggcgaggaggcattcctgaaagcagtgtccccgtgaggcggtgctcctcagtggagggtgccaccttagtcctcccctttcaccttcgtctctgaggactgcaaattgtgataaaacgctgtaggaaaggtatgcagataattgcactgaaattcccactcagttttctagggtgagtggaagttgtttatattacagaccaaacatggtttggggagtggaagagttttgggctaagaggcttcactgcaaaagccacagggagtggttgtaagtgaagccgagagatgaacaccagtgaaggaactgggtgaaaggtttattaaatgtgcggcttgtgcacttagaacaggaggttgtcatcatttgggccagcatgggtgccagtcacgaggatggacagagttgggagagaatattagagtaggtcatagtattttagcatctcatatttagacagtggtattcttcaggccgtgttgagataaagtttcagctgtgtcacctgcattgtcaaaccaggagatcttgtctagtggtaaaggaccacgttctagtggtgagtgacaagcaccttggagacgcgccagcttgcctctccccgagtctgggcactcctactgtacaattcctgattggtggtcatcctaccatgtgctgagcactgccagtggcttggacagacaagcttggcaggactcccccattttgtgttatttgaggttggcatatgataataagtggttacaggtggaggaagctttattttgtgatgtatgtctctattcaaggttaaaaggtagggcaggtttaatgatcctaagaaattttaaggaaactgaaaaacccatatttttctttactcccttctaccttccttgctgatttggagaagttgtaaccaaagaagaattgtgttactattgtgggttagagaatgagaacattttactacttgaaggggcctcagatagcctttaaaaaaaaaaaaaaaaaaaaaaatatatatatatatatatatatatatatatatatatatatatatatatatatatatatatataacatagaatctgtattccagtttggtgggatatcttacccaaagccacgtggctgtcttgtgacagataccgtagtagaattcaagttgtctggctcctaggccggattcattcactgtgctaggtgttgggtcttttattttgttattcttcttttgatcggatttctctcatgccatgtgttgataaagccggaagtctgagatggtctgttttcaagaaactaagttctaaatgtagagctgcttgttgttgttgtcggtggtggtgtatgcattcaatttgaaggaaaatttaccaggtcaataatacacacgtttccacacatttttaaagcaatcagtgagctggccttttaaaatttcatctgcgttaaaacatccctctgccgaggcaaggaagtggacattgaggtattaagcctgtccttcagccaagcactgagggcccaagtgttagaattaaaggaaaaaaaatttcccattgtattaatatatttacaaaagaaaagtcataaataaaagcagtggccatgcctccattccatctgtgttcactcgcctctcctgcttccttgctagtggtgggggtctgagtacattgcataaagtgagctctgaggaaggcttaaaagaaaaggaataagactaatgaattctcccctgatcgcgcctccttgatatttggtagacatgaaccaaggaaattaaatattgattttaatgtataaagtgttagtcgctagcttgtaaaaaatattattactttagctagtctctgaacataattgtgtgtcatatgtggcccataggtttgatttatttagtaaacacatgatgcttcgttctcataatgagctatagggggaagaaaggaactattagtgttctaattttccgaataaggaaactgaggtacagagaggttgagtaacttgctaaaggtcacacagatggtaagtggcatactcagccctcgaacacaggcagtcagcctccagagcccgtgctcttactgagctatgctgaactggaccaagtggtaatgatttcatggtagatctagaacaagaccagatatcttcaacaaaacaaaaatgtatttgctttgctattgcctagatttacttaaatccttttctgtttcaagatctgtctttactttgtcattaaagattatttcagtggcggtattggacagtgattttttttttgagcacaggatgacactgttctcggctgaattgctcttttaaagaaaggtgcaagaggttgggaaggctgattgtggtgttgtagcacttagttccttctctcaggaatgccttccagtcttgggctcagccatcctttggcggccagagggacactgttcttccctgttactctctctactcaagtcaaagaagaaaatattccaaatctataatattctagtatgcagttgggaaagacagttttttttttgagtgcgtgtctatttgtctttaaaagtattaaatacctttgtgacatcaagcggctcactctgtgtaaggtgaaaagcctcttaaaatcctggaataaatctggatggactattagattgtcacaaacataattaagttttttgtcattactttcaatggcaatactgcaattacttttgcaccagcctaatgcattctcccaggtgcttgctctgcctgcctgttgatgagtgagccacatgtcagccggaaacagctcagcctctgcatggaacacaatatatcaatgaagaagcaaagaggagcatcccctccccatgtagcccagctacatggccctcaggctgaccgggggtcagcggtgctgtgtgaagtcctgtcacatggctccaaaattagaaaggataattagagacttacaattatacacgtttcaatgggttcctttgtgtctgagtgcttctcgctcgccggcttatcagcagatgaccacaacttcaatcagtaagttcttaaggcacaagtgttgtcactgtgaccattagctggatattgtccatttccattgaacttgggtttggacaggagaaaaagaaatagcaaataccgtgacatggcaggaacttcttttttggttctttggaatatatgaagctgctttttgaaataacctttgtagcgtgatgatctattttatatctaagcttccaagttttcctttcagatcttgctcgggatactaacgggtatggcagaacaggtgaattacatctgcgtgcagctgatctgcctgagggaagcgcttcagtctgtcttcagcccactctgaatttgatatttgtggggatttttttttttttttttgccttgctcttatttctttctcctccttctcaaatggaatgcagtgtttggaaattattctctttcttcctcagtttttctctatctgtattgtttgtccgcttaggaagaattcatgtgaaataagaagtagaaatttgttgaagtgcgatttgaaaaactgtttcaacatcccagtttaaacttgaagtcactttaatataatatataaatattaaaagaataatttaaaataatgtgacattagtgaagctggtgacagagaacaacattttcatgttgtgaaattggagagatctggctgcccacggagctccgggcttcttttctgccattggtgctgggaaggtctgctgccttgtggcttcatgagcctgttgctgttgctccagtaatctctttaatccttttcttttacattttaaatttgttcagtcaaaaaagaggttctcatttttctctttctggcttctttccaaagtagtgtaatggtgatttgattttttttttttaaaaaccacaaaggagttcctgctcagtgatgtgggttaggggctcttctaggtctcagagccatttattcctggtttcgaattgtttcactttctaggtgcgtatttttgaataaatacataaaatctgggaccctctgcaagcgtaaaatgaaatgaataatacctatctcgtaaaggaggaaggaggaggaaacgagattaatcagatggaacaaaaatcaagaaaagaaagtcaagtggcctaacaatgtccggtacccagtaggagctcattaaatacaaatgaataccaatgacagtagtaacccaaagaaaagttattctgccactcggccatggacagaagtcctgcatcggacccttactacggggcttccttagaaatcactttctgtctatgaagcacagtgcactgtggtaggtggaataaacctggagggttgagactgaagagaagaggtgaagccatcctcttttctggcagcttgttctcggggaggtcttttcattcgtggaacttctgattgcttattggtaagatggaaatagccttatcaaccaatgtgcagttttgtggtaagactttgctaagttctaatttgtggatatttattttaaacctatcatgggtgttgtagtagtctaagagtctaaggaataataagaaaatagataagaaatagcctggtaaaaagaaagatgcaaggatttgatgaatgtttgactctaggacacatggggctgagtcaaaatgattgtgagagttcaagcatgggtgactggctggagcaagaaaccctgcactggagttgggggaagcagcaggttggtaggaggacacctagtgtgatcagatataaagaggtcaaattggaggagagagagggttacttgtgaagtgctggtgggaatatgggactgaaggtcactggagagactttggagtcacccttttagatgtaagacttgcagctgtggttatgagagggctctcaagggtgaggagtgggctgaggatgggactgtgaggaggggctcacacaggagcacttgggttttgcttatgtgtccttctaatgccatctctgtagaaaatgtgccctgtaaggtcagtttcctggaagctcttctgtgtgttgtcccttctccagcagtgggtcgattgtcagggagcccaggatggaagctaagtgcactggtcattggttgttctttcagtgcccttcagacagcccttgccctggtggtcttgtgccctccctgtctgtttggtgcctcttttataaattagtgatgacttcaggaaatggtcctggatttcaaatagctattcctggagacattctaattctgtggtttaaaccttaaaacaaacaaaccaaagtaattccctggatattggtggctactggtgtgaagagcatggtgcggcgcctgttacttggatgagctttgatcaaagaatggcatcaaatgataacagacattggaggtataagtgattacaaggagaatcatagatctaaataaaaatggaatggtggttaatactttaattgatcgagatgatacagcaatatttttattcatatatcagtacaatatttaacttttaaaggaagtgatattcatcttagcagaggtctcttagcaccatatttgcaacattggatgttatccattgagccttgttttggggaggaaaaaagacaccaactttcttgagtaaattgttctctgaaggtgttttacacaggaatacaaatttgcctgaactcaaaagggtcttgtttacagtactttaatcttgtttttcacttcataagccctctgtaaactgaaatacagagctacaggcaaacctcattttattgcacttagctttattgctctttgaagatactctgttttttttttttattcaaattacagatttgtggtaaccctgcctcaaacaagtctgttggtgccatgtttccaataacaggtgctcactttttgtctctgtgtcacattttagtcattatctcaatatttcagactttttcattactgttatatctgttatggtgacctgtggtcccagatctttgatgttactattgtcattgttttggggccccataaaccatgcccatataacgtggcaaaccttatcaataagttttgtgtgttccgattgctccatgaaaccagctgttccccctctctctccctcttctcgggcctccctattgcctgagacacacaatattgagattatgccagttaataaccctgcaatgcctctaaatgttcaaatgaaaggaagaatctcatgtctctcactttaaataaaattctagaaaggattaaacttggtgagaaaggcatgttgaaagccagaatacgctgaaggctagacctcttgcaccaaacagccaagttgtgaatgcaatgaaaagttcttgaaggaaattaaaagtgctacttcatagaacacatgaataataaggaaaacaccttatttctgatatagagaaagttttaatggtctggatagaagatcaaatcagccacaacgtttccttaagccgaagccagagcaaggctctaactctcttcaattctctgaaagctgagacaggtgagggagctgcagccaaaaagctggaagctagccgagggtggtttatgaggtttaagaaaagaagctatctccgtaacataaaagtactagacgaagcagcaagtgctgatgtagaagctgcagtgagttatccagaagatctagctgggataattgataaagctagctacactaaacaacacattttcactgtaaaccaaatagccatctattggaaaaagatgctgtctaggactttcttagctagagagtacgaggcatcgccttttcttaaagcttgaaaggacaagctgacccttggtaggagctaatgcagctagtgacactaaattgaagttagtgctcattttcccttctcaaaatcctacggcccttcagaattatccttaaatctactctgcctgtgctctaggaatggaactacaaaggctagataacagcacatctgctgacagcatgatttactgactattttaagcccactattaagacctactgcttagaggcaaaaaaaaaaaaaaaaaggatttctttgaaaatactactgctactcattgacaagacgcctggtcacccgggagctctgatggagatgtacaagaagactgatgtagttctaatgcccgccaacacaatatccattctgcaaaccatggatcgaggagtaattttgactttgagcttttttggaaggaatatattgtgtaaagctgtagtcactatagatagtgattcctctgatggatctgggcaaagtcagttgaaaaccttctggaaaggattcaccattctagatgccattaagaacatttatgatttgtgggaggaggaggtcaagatatcaacatgaacaggaatttggaagatgttaattccaaccttcatgagtggctgagtggtttgaaacttccagtagattaaataactgcagatgtggtggaaatagcaggcgaacgagaagtggagccttaagatgtgactgaattgctacagtgtcatgataaaactttaataaatgaggagttgcttcttatgggtgaataaagaaagcggtttcttgaaatgaagtctactgctgatgaaaatgctgtgaacctcattgagatgactacaaaggatttggaatatttcataaacttaataaagcagtggcaaggtttgagaggattgactttaactttgaaaaaaaaaagttttgtggtgggtaaaagatgatcaagcagcctcacaggctacagagaaatattttgtgaaaagaagagtccattgatgcagcaaacttcatttttgtcttattttcagaagttgccacagccaccgcaaccttctgcaaccaccaccctgatcagtcagcagccatcaacattgaggcaagtccttccatcagcaaaaagattaggacttgctgagtactcagatgatcattagcattttttagcaataaagtttgtttttaaaggaaagtatgtacactgttgtttttagacaaaataccgttgcacactgagaaactacagcgtaaacctaactcttataggcaccagaaaatccagaaatttgtatcacttgctctattgtgatatttgctttattgcagcattctggaattgaaccagcaatatatccaaggtatgtctgtctattgaattggctcaagctgttagcagagccttcatttttagtacttgagacagacagtggtcatggtgcaagggaaggtaaataagtttctcatgaatgctaatgaggattaatattaatctctgtcctgtctaatgttagataaatgcttccattttgtaatccccatacctcatatgctgtttcttatgcctgtgcctgacgctctatttgcaggtattctactggtctctgaatctaaaattacaaaaggaaagccttaaaaatcacacacactgaactcctgagattttctgatgtttttactcaccatcttgccacccaacagcattcacttgggagcttattagaattgcagaatcctcagccccaccctgacctactacattagaatctgcattttaccaagaggtccaagtggtttacattcacgtggaagtttgcaaagcactggtctacaacggtggtccatggagcaaagcttgagtagtaaagctgtagcacagtagttctcaaacttgattgctcattagaatcatacagggagctctgtaagcttctcatctccagccttcaccgtcagagattctatttgttagagtggcacctggacatggatagctttaaaagcttccccggtgattctgatgcgcagcctaggttctcaacaccttgctactcccaggtgtgggcctcagactaacagacatcacctggacctggttagaaatgtgtctctcagataccaccctggacctgctcgagcaaaatttgcattttaacacattcccaggtgatccatgatcacgttgaagtttgggaagcgtttactggaagctgcttttgagaggcgtttactgcaagttgcttagaggcagaatacaaagttgagccagtccccgttctcagggggatgtgggcctgttaaaggtaactccgcttttggaggggaggattctcctaacagaggtttgggaaagtgagtgctcctggctgtgaacctggaaatgatttcttctgttgtcttaggtgtggtggtgatagggagtccctccaaactatatcagcagggattgattgattttcctgcttaggaaacgtatggttggtggcgaagagtgtgggttcttaagtcggagtgctttggttcaaattttagtcaattctctgtctaagtcatttactggcacataatcagtaatcatttactggcacttaatgagtactcaataaatgttggctattatcagtaataacagtgcttgaaatgcttgaaatgtctttaaaacctcttcaaagtcacccagtatgaatggactgtggtaaaatcgaattgacttgagatgttgtttttctgtaataataattctaagagccttcaattccttgactctgaggaggtttaatgatagtttcttttattgtctttataattactctatttagaagccccacctcaacgcaaacaaggtgacattttcttgtcaagagtaatattataaagtctttagtatagagaaaataagatgtattgaatagttactattgcgaagcaatcctaaaatttcattattcgtagttggcattcacttagcaactatttgaggattcagcacgtagtattaatagtgttatacttcgctacaggcctgtctcttctgttaggccgtggtcttctcaagttctacgttttgggactcagagaacccctggcatagtggccagcacatactgggcactcagtttttgttgaatgaagaacttaatgagcagctgctctatagtagatactaaggtgtctcccaaacaggcagatcagataacttcagaaataactctagtgcagagcccagagagccaggcttcatggttctgagttgggggttacttgcatcgtgggatgtcacggaggtccttgtgggggtgctgcattttgaggtgggctgtgaaggctgagttggctatgtgtaaagggttgtgggtggcgtggagcagggtgacatgccagagagaaggagctgaactatggcagaaggagcagcagctgcttggatttggggacttgagagtgaagggaattgttaacctctttgccccctgttctgttaattgtccagactgaacaggtgttgctgcactcaaagaggttgtagtcattatgcagttggctttctaaagcttctgtaacatttgaggcataccaaaaagtgtagacaataataaacacctgtgatctcatcatcccacttaggaaataaaagtatttcagatgaattgcaaactcctctcctctttatgcccccagatctcattcctctctttccttccctacgtagtgaagtaaccatgagctgctgatgtttatcattcctttagagatgtgcatctgtaatcattagacagtgtttcacacacttttcagcttcatatacaagctatcttgtttccttttgtgaaactggccattgtgtctgagttctttcatacatgcaggttgcctttgcctggcagtggtggctgctttttgaggacatacctgtatttctagattgtccctttctgtctttacccttttttcctcagtatttgaaattcattcttattgactcagccctagtttgatcagtttaattgctgtatagtattcattatgtgaacatactataacctatttttttcatttttctatttatgggcattttgactgtcatattatgtcaaacagcatggcgatgtgcacagaaccttcatgtggctttttgggaacacatggaagaacttctctagtctgggtatatatttaggaataaaattactgcatggtaagtataatcattttctggtaaaccagaacattcttgaaagggcatattacatgttcttcgagtgtataatttttatccacttctgtttagaaagtaatttttagtcttttaaatctccaggtcctcataatccccgtatcccaacaaaaatagcaggatccccaggaaaagcatggaaaagaaactgaagtgaggctggtctcctatccctgttagggctgacacacactctggcatccattggttaggtctggcggccacggcttccagtggatctcaactcctgctgtccctggtttctcggatgcctctgtggcagttgttgcctgtgtctgacagctgtgtgtgttgcctggccacttacgtgtctgaagcaggctttggacaaccaacaggacaataaatattttcacatccacgagcagaaaaaacaaaactagaaatgaaaatagaaaatcacaaattacatgagattaagtgtgaatttaatagagctaaattgtgtataatattaatgacttaaatctattttgttgtctatttcagtcaagtgtgaatttaacagagctaaattgtgtataatattaatgacttaaatctattttgttgtctatttcagtcatttctttaggaccaggctgtgtgtgctgtaggaaattgcagtctataaaatagttgttcaaaaaactttagtgctattaaaccaaatcagtggcaaagttactttgttttgaacgatgctggacaaatgtctcctttcccttaaacggcaaccactccaaataagcttagacagttgccttttctgactgctgtcagcttgccatctggctcttaaagagttaaactagaggtttgtgaggtcatgagtgacttcattgggtctggacttttgaagcaggtctcttggagggaagctgtgttgagagaggaggctgggaagagggggacgtcctccttcaacttctttcaagttcgtatccctgagcccctgagggatccagtggcattctgggagaatgtcactgcggagtcagtgtgtagcagtttgtacttgcaacagaagcagctttagaagtacattaaaagagcccttgcggaagatgaaagtttgctgagcagatggaatgggagaatgctcttcaattcctgacaaaattatgggcagactgtttgctgacgaaggtaactggaaattggtgtattgtctttgtctggtcctaggcagtgctggattatgtataattgtaattgtagaaacttccttggatttgaaaatagattatttcaaatgaaaagcattgtaaggagatcctaggaaagacttaggaaaatgatcatatgttaatttctaaataaggatgacaaatgaagagtatatttattacagggtctacaatgtttgggcaaaatgagatttttccctagtggagttgtgctgctctttgaggcgcttagacatagcttggtgttcctagactgcatgtgaactccagctaccctttgtgaaacttcatccaggctgtggaaggtcactaatttgagcttagtcatgtagtggggtccgtaatgactactgcacaaggctatcattcttattttggtatatcactgctctgaagggaaagttggctgtgctgttagtatggaaaggtgattcaccttagaattcaacgttttactgaaacttcaaagattaaccagttatctaatgaaaagggcatagggagttttttttttccccctggagctgagggaatttcagcctcacggtttctttctgggaaagtttctgttgtgatgttcaacaggcaggggataagtgaggtcaacgatgctaaagaaggggaattgagcctagtccgttgatattatgtccattttcaagatgcctgggattgaagaataattcctgaccatccagaacccagcaagaactccagggcttgatcttccagggtagtcaatgattataacaggtgtatttgtgggtatgcattggtaacattggcattgcttgccttgactatggattgtaagttcctatttccagtatttttataatgccatttgtctggctagcccatcagtataacaattttgcctcttctgtttggacattttgtttcataactttaataagaaatgacaaagagaatatttgagggaaaaaggccatgaaatatattttatgagagacataagcagagtggctctgagtctgacttaggagtcataggcccataggcttcagttttactccttacagtttggtctctagcaagttacttaaccacttctgaagctcagcttcttcgtgtatgaaataggaatgataatagtatctaacatgaggggtggtggctgtgaggattaactagtgtgtagtgcatgggaagcaattaccatagttccttctgctctaaaagagctcagtaaacattaatgatcattggctattatgacgtttaaattgtgcttccttatgtgaggcacgtgaggacttcgatgttagagcatgatggtgatgaatttgaagttgtgggcaagctcacactgtaaacacatcagggcttccttgtggccaggttccagggtagcacctctgttctcgtctcagtcagttgggcatctctcaaatgcagccttcagtggcaacgggggctgggagaggaaaatgggtagattaccgcaggtccatcagcactttgtgaaaacatctgtgtgctcatgtagtgtggagggcatgtcagtttcataaatatggggagcagcattgtgtacacatgtaccccataggcagcatgtgacccactcaagaaaggactgtcagaaactggccattgtgtctgggttctttcataggtgcaggttgcctttgcccagcagtggtggcagcttttttaggacttgtctgtattcctagattgtccctttctgtctttacactcgaggagttggtagctgtgcagctgtgtgaaagctgcttagcttctctgagtgcctggtctgagtttcctggtctatcacttgtagataatatttttattccatggttattgagattaaatgagataaagtatgtgaaaatgcctaaaagaattaagtactaaagacttttttttttcctgcctcaaaaatggctcaatttcttctgttaacagtcaagggaaatttttgtaaaatttgtaaataagaatcttgttatactttataaaggtcttacatttaattcagtgtttctaaagctcttgtttaaaactgttgtgtgattagtttacgtcacctgatgtcagtttctttttgccttcaccactttccagtgtagactgtcatccttatgggttttagattgaattttgatctagttttcaaagatattatgaaaggaatacaatgccaacggtaaaagttccattggtcccactctccagaaggaatctccactgtcagtttctagtctatcctcacaaggcagaatctgtgtagctctttgggagctgatttgaaactgccttgttgttgcagaagtacagatgtggtagggaaagttctgtcgggcttgccagctccctgtgcagctcggtccctccctgcaattccgtggcacagtgtctggaatgtctggagctcccttgatgggaaccgcctgcacagctgggttgtgtcaccaagagccgaatgtgcttgacaggtctagctccagccatgctgctgtgggacatgtgattaacccagagttcctgtaggagagcgaagagcttgcctcgtagcagagggctggtctgaatccactctggaatcctgtcctgaagtcctgaggagacagagcctgctttgggttccagctgggattttagtcattgtttagctggccggaggctgtggttcagttggccctttggtctattgttatatttggctttttgtcatgaatatctttgggtggaggtagagtagaaggtgctgaatatggagttggaagatgtaggctcaacttccggccttgttgtttaccagctatgactttgggtaagacttccttggtcctcagtttctttacttgcaagatgggactattgtgaggatgaaacaaaataactatgggaaagtgctagatggactgcagagtgctctgtggattttttggtttgtttatcttattggatgttcaaaggacagtggcttattcctcttacctgttgagatagactgaactgttgatgcttcgcaggccaaggaacagttgtagctgtctggtgttctggtgtccttgcactttgtctcgcttttgtggagatcttttgtcccctctgttcttgaatgctcctggtatgcataagaacctgtattcagaagggagggggggcaatagagtttctgtgcccagcatgttcttaaggaagccactcccttttgttgattcagctggtcctttattgaggccctgctttttagcaggggaacctctgttggtccaactctgctattgatggtgagacttgggaagagtcgcgtcctctcatgacccctcagtttgcccatctgcagagggggttgagctacaagacctttttgtgcatggggaggagagatagtgactatctttccttttctacttctcctttaccttgctgtattcaccgtcttactgggcaatttttgcctccttttaaataacttacgacaattgtcttagaaaacataggacaagtgagtaatgaggctgaacttctagctgagatgccatgttgacttctgagaactaaatgaatgaaaatctcttaagggtgacagggtgttaaggatgagtatcaaattgtcttgcctataatctgctgatcttgacatcgctttgttttgtaatcatccacagctgatcatctttgatcagggcttctgggtctcagatccattgttataggagctgtgagtacctgaaaggagccagggagaaaggatgtcatgacagctggtggctgaaatagagatgccaccatgagaagacatggagaatgaatatctttcagcgtgaggcaacaatccctttgggacaggggaggggcctttgccaggctatgtgggagatgtttgcattgctgtggttctggttttcaatgcttttcatccatcctggttttctcaagctctttattatctgtatgttgttgaacagagaagtacatctatcctgtgtggacattttagtctagctttcccatggcaagactgaattcctagatgacagtaataggataacatttgtatttcttcagtattttgctgctgaaaagataaacaagaagagttaaatctgtctctgcagctgattaaccagaaggctcattaatagctctagtggtgggaaacagtcactggctgctagaacttgtgcatctagcaagtcccttggggaactcatcgattggaccaagggttggagacccatggaagatgtgcttctggttgaaacagtttaccttagatataaggagaaaagtttaccttagacatgagggaagtcatagtttcaaaagacaaggtcagtcagtaagaggaaagaatccacctcagagattcattgcagaaggtcacttccaatagatggcatggctgatagtagatttgtaattactgtagcgcctccgaatgatatctggcctcatgggagcatgtagcctatgaatgctgttgccatagttgtgagtaggaggataatgccgatatttcaggtttctagaaatgtaaatgatacctagtatagacctcggccaacatgtaagaagaggcagatgaaaaatattgaagtgctgttagcataaaaatagcggaccattcagccgtagtttacatctcggctgatatgagcgactgaagagaaggcagttgaggtgtctgatgcatagtgcatggccaaaaatagtactgtaataatctagagggttagacaggcaccaagaagtgagccgaagtttcatcatatagaaatgatagatggtgtgggaagatcaatgaatgagtaattgtctgtgattggaattctctgttttagaccctttcatttgcaatgtaagtggaaattctgttgatttaggacttggcactttttactaaatccctttaccttgcataagttttctaacaagtagatgaatacctatttagttgccaggtgtataaatgctgcttcgggactggaggcagcgatatggccaacaggtgtagaagataaacctaagggtgatctaaggtgattttggccttggattttctgacatcttgacctttggaagcaaatctgtctcatcttgcattacagctttgaattcatcattgattgactttgtggaaattgcatagctgagcatttcttaaaagcttaaacatgagggaaccaagaagtatccgcttgaaatgtagccaaagaatggcagttgccacatttttgtatgacaataaacaacctagaccataatccccaccgtctctgcattccgccccaacctagggtgagtttactggtcattctgggactcctctgtgagcaacaagccagtgttttgatagtaatttctttctttaaaggagaaaaacatttttagtaacaacaaaaataggcacccaccactacacatacatacaagaatatttctagaagcacccctacatgagagagaacatacagcacttagatttgagccgcagtcttattaagcgtttaaaacttaatcaccactgctacaagctgcttctcagttgcatgcctggcttggctgcctctccatgggaggtggccatttcctgagtcagcagtatctcttcctgtggcacccagttcttcttgggaggtctcagggccatgcaaccaggggaccagctctggcaagaggctaagagatccatctgcagatgctaggttgcaggccaagggtggggttgccctacgcagtatgtattcagtatcaaaatccatgttttgttggctggggtagaagtcatatttatgttgtgttgcgttcagttttaggaaaacacatctgaagactgtctgatgtaactgtacaccaacatggttaaacagtgaatgccttcttttagagaaagttacttcactgtaaaggaagtaacaggatttagggatttttttttttaactctcgaaagcttgtgtatcttgtgatcagtagctagcctttttgtgttctgatgctgttcttttcacctgctttcttgatgacacgtgttccttcccctcttttctttctcttccctgcctttgcagtctgctttatcttcaacattctttgagttgtcatgggtctttttcttccctgaatatttaaccaggctcatgtctccccgattgtttctgcagcccacatcctatcttgctgattctcactagccattcatggaggaggactttaagttgttatgctgctatggccattgcacatccaaggccagcgtgactctgatcccagggtagccttgtgtttgcgggtgccacagagggtcaccagaaaagcattgtgctgggagtcaggagactttggctctggccccagctctgtttatatctaagttcttcatctctctctgaagctttcttttacttatctgaaaaattagatttggttaaataattcacatggtgtattccacctctgaaaactcattacttgacggtacgaaatcatactaattctggctccttagattagttatttgtgaccagttaggatcgtttattcaaaacaaattgaaaacaacgaggatactgggattggagcaggtagaatataccaaaaaagtagcaacagtgtgcatagcttgcccagtgattaaggcagagcaaggggagggagggagagagtgcttttggctggtttgcagtcttcctgggctgcctacacagcttgacgttttgcattgttctttcatggaagtaacatccactggttatcttcactctgagttgactgatgggagatatttactttgaaaccccaattgcaccttttccaggaagggaagcaccaggacagtaggagatcatactgcagtctcttttccttggctcaagtgactggttgatggtgcctcttctccatcccttttcagaggggcctggtttctcgcatgaaagcagaagtgtgcgcctcagcagcggaagtgaaaccagcatgtaagaggtgaaaggcagtgtcgaggccaaatcgggaatttcttgactcttgcttatccaggacatgggtattgtaggcacaaattgaggcgaatttttctccctttagagttaagggagcatgggattggcagggtggggcctggggttttcctggtacttcacatgagctctgtctttggctgtgtcacctacccgtttctgagctgacctcatctttaaaatgaggttgttgggccaagccaaacaatttagggttttttccagcaccaacctgccataatctgtaatttccctcttcatgagcaagacccctagagagatgtggcaagtgagggcaaagggagttgagaccagtcggttttgccggcgcctcccgtgcatcctgcaacttctatccaggcagaggccgtcttttaatttctgcacagcactaagtccaggttaccacaagatgtttgaaagttgattgttacttttggtcagtgtactgatttgttggcatttgttgatcatttgtcagcagtccgtgaccctctctgccaggaatacaacctcccagagacattcatggcttcctggtgtgagtttccccaggagtagcagtagaaccttcgaacccctgtaccttcacaaggaacatgtttccctgcagggcgtggtagaaactgttctatcgttagtttccgccccctacgtttctgttcatctgatttttcttcaaaagcctcaaggacattcgtagccccacagcctctgttaaatgttggcattcaggttgaagggcctacttgtgcccttgagccttggagtgaggtttagcagggaatatcactgtttctctagagaaatatttacctttgccttcttggtaatgatatcacaatcaaaacatttgtattgctactgatacggtcaaacacatgcgttaaatggcttattaagaatgttttttgatcatgagggaatctgcaaatctttcttctatctctctttcttttgcttccacagggtaactttatagtcaaattgataagcatttaatatacatcccatctctacaaagaataccagtctagtcactcccagagagtggaatgctttcgctaggctcataccattgatttaggcgaacagtattgagtggagattattacaaatgcatttaattattcatgctattggtcaagaaatataaaggatttcatttagatgtgtttattttcttccaaacagtaacttcagtattctttcccataaaatcctgagactaagtgaccagtttgagttcccttcttccgccatttattttaattttttttgtagaggtggggtcttgctatgttgttctggctggtctccaacgaccggcctcaaatgatcctcctgctttgccctctcaaagtgttgggattacaggtgcgagccaccacacccaccctcttctgctatttctaattgatgctgcagtaggcctgtgaaactcctgctgtcagcagcagggagggagaagagggagtgaaagaggtccagcggccctcatgggtgtggctgacactgcccacagtgttggtgggggccgccccagagcactctcagtgtggacgcacctgtcttccgaatgccgtgctatgcacctggaagtgacgagtgaaggactgatgagggagttgccaccctgcttatgtcagtaagtctgagaatgcagacaggaccatgtgagtgggacagtgcagccgccaaaggcctaggggaccccatccactccaggagacgcagggtttcttcagctcactactgagatgacagccgttcctctcgccatcctcttcaaagtcatatctatgatcaataccctttaactcataaattacctataatttatgctgccagcttcttggagtaacagaatctcaaatcagaatggtagtaatgaaatattctttttactttcaaagcaatattctaatagacaagataccatatttttacctcatgtttttcctttagaatatacttatcctcaagttaaaattttatcccctttacataacaagattttagaaaatctaggccagtttgaactcccatgacgtgctttgagccatccatggctgtacattcccagattttagtgcaaagcctttcccaccaatttggaatgaactgatcattgtaaccagctttgtatgaaacacttgtttcggatcccagcgctgtagtgatgtcattttctttatacccaaagtaaatgctatgcagagtagcttattctggaatttggctgtacgattcttctcttggttaaaatcttccatagcagaggagccctgctaagtgaacagtctctcttacacattggtttttgtgcttctaactaacttttctaataatcttatttttccctgagaaagcaatccatcctatttaatgtggagtaggggttgtggttggaaatgaaaacaaatccagtatgttctagtctgatttttttttcttttttagcatcagtgtgttttcagtagaagtgattcaatcttaatgtggtttgggctcaagggtagagaacaataagagctataaatatagtagacaagagggggatcatgtttagtcaagataaagtctactttaagttgtttccatgtaagaccttgaactaaaaagaggaaaggtgttagatctcctaggactcattattagagttttaaagtttctgatggaaggtataagtgtctatcttaaattatttatatattaatgaaatacaacagggaaaagatcaatttgtaaaaaatttcaccatctttagaattctcaggggacccaagggagaaggggaactttattttctttctttccatggtaccttcgtatttgaagactaattatcagaactcttggagtttttaatcctggggagatacagctcttagataattataggtaatttatgagttaaagggtattgatgggagtcttcccataattatgttaaaatttggaaccccatagagccagctgctggacatctgtcttgtgggaccagaactcaaaacccaatggacagaaccttgtgtagggttaaccttgtttttttaaatcaggatatttgtcttcatagcccagcttgcccatttcctgacagtattgccttgggtaaaaaaaaaaaaaaaaaaatagtctatcttataaagtggttatagaagacctacttcctggagatattgtcaggatcaattgagataatgcttgtgaagtgcttgacatggtacctggaaccagtaagtgcacaataaatattgtcaactgtcattcatcaccatcaccaccatcatcagtactggaatatacctctattttaccatgcttttgatattagttcccttaatcacaaagcccagattagcaacaaataacagtatggcacactcattacttctctacttctctattctttgtaccgtttttgatgcccttgggtcaggggtgttaggtgaggactgaaattgtatctcaaagctgttattagaagaggagaacgcattataaacccagaatacagagtgctctgaagtatctttccatggaggaggggttttcctaatacctcttatattacttcgttatatgaagggaaagggaagaaaatggagaaattaaaatattctttgaattttgctcagatgtttaggtatggtgattctaattcctcatgctgcaacttgtctacctagagcaataactctttttttttttttttgagacggagtctcgtgcgatctcggctcactgcaagctccgcctcccgggttcacgccattctcctgcctcagcctcccgaatagctgggactacaggcgcctgccaccgcacctggctaatttttttgtatttttagtagagatggggtttcaccgtggtagccaggatggtctcgatcgcctgacctcgtgatccgcccgtctcggcctcccaaagagagcaataactcttgctactgggttcctctaatactactgatggttttatgtttttattaacagctatagcaaaggcagcctttttgagtggcatattgactgtggaaaaaataacatggaaaatgaatttatctttataaaagaatgatatgaaaatgtatgggtttttgctcaaggaaagtccatgcctggttccatgtgttctggcaagagggaacttctgaggaaggcttcttctgtaccttaacattgcatgaggcttcatttaatcagtgcattcatccctgatagatgtttgtctaaaacctttgctgaagagctcttcttcactgaatattaatagtctgtatactagtaaagccatacaatttttttttttttagacggagtctcgctttgtcgcccaggctggagtgcggtggcgctatctcggctcactgcaaactccgcatcccgggttcacgccattctcctgcctcagcctcccgagtagctgggactacaggtgcctcccaccacgcccggctaattttttgtatttttagtagacacggggtttcaccgtgttagccaggatggtctcgatctcctgaccttgtgatccgcccgcctcggactccccgagtgctgggattacaggcgtgagccaccgcgcccggccaaagccatacaattttgtgagagctatttatcttaaattatccagattgctctcaaagagaaccaaaattgtttttcccatgtaaatcccttatgagagcatttttatgtcctacttctaagtagtctctacagcgcaaaagggttataaaatgccatgtagactttggaactgtgcagtcttcagctgccttgggtttatgggaattcacatagtgatgtcgcatagagtagctgtggctttggtctaagctgctctggctgtgggccaaatgctagttggtgtaatcctctgtcagcagatgccaggctcattatggacccagcagtaggtactttttgcttcttggtattccaagactttggaaatcctggttaacatgggaagatggtgaggtcttactgggtttttggccttggaaacagcagaggagagccatccactgcctttctgctcctgtgacacgtgggcagggtttctggcagctcttccttccctacctctccactggtctgaagtattgtttagaaatagagtaggttttatatcaaaagtctagttttttttaaagtctttaatgaagggattagggtctctttactagctaatgtgtttagattcattttgtcatcctcatgtgtttagggcttctcccccaggtggaatggtgtagaagaatctttctatgcctgtctttcagagacttcctgaagatggttcattcatgttagcgccagatggaggtctcttgaaaactcaaagaattttggctatcttcattatacttgagtcgcctaggcatgactggttgatactagctgggcacagaccagagaagcccacacattcaccagtgtcctgcctcttacccacttcaaacaatgcctgctcttccacatgagacctagagagccccgtctgctctctccatgctagtgagtgtttaaattcagtgtgtgtgtgtgtgtgtgtgtgtgtgtgtgtttaaatagcagacactcttaaaaataaagatttactaagaactttaagttttatcagctgtttgaaagtagagctgctttgttgagagcctgaatgggagctgctgagctccactctctgggcctccccagcactcccaaggtgctgtgttttagtgggctgccctcgctgagaatacacaacagactttttttccacgcagtgcctgagcatgcatgaatattggcatacacactagccagccataacaaacacagcagtctgctaagccatccaattagtgtggttactacctagctgccttaggcctgagttgtcaatgctggcagcaggcttagtaggtggtttgggttgtaaacttgatttttacccaactgaaatcatgggactttcttctgctttctatcctctacttaggttcttgttttagtacttttaaaatagagcatgatattctaataaccttaccaagtgtagtagactgtagtagaattttagaggggcaaggtgcattcatctatctcgagacacacacacacccagatgaatgtactgatctcgaggaagtaagacaacttgcccaatgtcacaccgttaatagtgaaattggaactagaattccctttatatattctgtattccagaatattatcatcatgtgcctctccaatctgactgctgtctgtgaatctgctgtcccacactggcctgacagacctctcccagagaggcaggataagctgtagttcagggtgtggtctctaaagtcagactgcctggatacacattccagctctgccactggcctgccgtgttatgggaaacctagcacctgtgctttgttttcctcatctgccaggtggacatactaataatacctacttcgcaggattgttgtgaagattaaatgtgttaatgcctgtaaacgtcttagaccaacctggaatatcggaagtgcttagtacacactaactatcgtttttgtctgaatgctttgaatgacagtggggacaaatgaaagctcatgatagatcccactgaaatgtttttctcagcttgagtagaccaactagggttcatttaaggacagcagaatgtctgtaccaaccctaccaacccccttcaggtcatctttgggaggccaacatgttcatcacaagtgtttgagacattttggtttaatgcaccccacacaacttccccacctattactcagagtgattgagggtttgaggcttagctgctgagaatgatgtgggggggacatttgcaggtgggtggtagttctcattaaactcttctggctttattcacttggcattcacattcctttgatttactgtggagtgattttgctcaagacctagagaacaacaggatcagcattaggattcttaaaggtccatggaatgactactttctactaagcacaagccagtattttgttcctccatgtaataatgtaagttattatgtagaattcaacagtttgtgggaggggagaagtttttatggaagggtggcactgtctgtctctgtgaatgatgtgggtgagataaccacaaagtattgctaagtaactaccacatttgtcagtccactgccatcgactgtgtgggaggcagggaagacacagtgtggagctaatttgtgtcatccctgtgtcatgggagagttatagccaagcccaagtgttgctttgcgtgatgagtaagatacttggaggagaactctgatcttacttgagttccacgtggagttgacttacagtggtgatgctggtggtgagtggtgtgttctataactactggagctgcaaaaccttctgaggaaacgtgtttttctctgggtgagtaaacctggttcctgcttacatttgcagaagtgtttctccttaaagtaggccgcctctgtgactgcccggaaccatcattccccttggctttgctgcagcaaacagactccacctttaaagagctgaggagttgtgggaggaaaagcaaatgggaggtgttctcatgtcgcaagagatgccagggaaattcacctttggacaatagatcttttacaaggcaaacttggccccactgtttttggtgtttatcctgtttcatgcttaagaaaatattttcctataaaaacatagaaacattcagctgagtttgtgtctaaaagttcgatggagaaaatttggacttgaaatgtctcttctgtccatgctctgtattggtaatgccagaaactgatgaactcaccacatttacacttgtaaatggtatgtctgtgctcaagttaggatcctgggaagcaattgcggctcttctgggtaagatgagctgcaagcagcctggctgtttgggagagagctcagtgcaggaagtagtgttggagctttagttccctttttaaaggcctctcccttctgcttgttttaaagttggttttgagttgtctgtcatcccatttgtatgataagccttttcctcaggcttttcatctataggatattcagagaccaattaagatgattgagaaacaaataagacctagtggcaaaaccttttgaaatgcagtttactagcttgtgagccactgaagtcttacttttttcttgaacattattattattattattattattattattattattattattattatttgagacggagtctcgctctgtcacccaggctggagtgcagtggcgctgtcgcggctcactgcaagctctgcctcccgggttcacgccattctcctgcctcagcctcccgaagtagctgggactacaggtgcccgccaccacgcccggctaattttttgtatttttagtagagatggggtttcaccatgtgaaccaggatggtcttgagctcctgacctcatgatccgcccgcctcggcctcccaaagtgctgggattacaggcatgagccaccacgctcagccggaacattatttttaaaaacagaactttggtttgcacatactcagttgccccaacttcatttatttatttttaaagaggacaggatacatttactgaataatatttacatttatgaagcgcagaaatgcttttgtaaagcagaagacacaaaggagggtcagacgatttcctttcatggaaacccgttttgttcactttccaagcatggtgaggcattgctgacctttaggtaatttttcgtacttaatgtttcttgatcacataaagccatcgctctacatgaaatcagaactgaagcgctactgtcattggcagaatattgttttagaaattaaaagtcccactcagggttgtaaggtgaatacagtatgagctgtgtcagatggcattatatgatttcacaaattattaatgagttaagccatatgattcatttgatcaatgagataacttaaaacctttcataattatgttctttagtagagaaattagggagctgtgtctgtacacgacaggtatttacaacagtcctctatcatttcatcccagagtgactctccccttacctactagccatctgcctgatagacaactggcatcttcaagatcaaacaaatcatgggtctgattgagattagtgaacagccatccttgttcttaattcaagtggagaattacttgaacatctcagagatgactagtgcttttatttttttaaatatgtttaaattttaattaaatatatagggacggggtcttgtcatcttgcccaggctggtttggaactcctgggctcaagtgattctcctgtttcagcctcccaaagtgctgagattacagacggagccaccatgcctggcctagagtacttttagagtttagtctcatttcagttactatctacatttatcatcttttgccagtgagtattaaaacatcaagaactaaatggtttgacctaaaacctccacttaatcccagttacctatgaggaatacactattagaacagagagcagaagcatgattagtttcttttagagccccctctgatttttattgaacttgctcctactcctcttgagcttggcgtatgcataggaatgtttattttacctgttttaagtgacgtttacttggaagcatttgagtagtttataaatacatggtgtcatagtattggcttgtgtcaggaagacttgcttaccacaaagcagtgaagtctcagtggagagctggcccctggtctacagagtgacccagagctgggtcatggctggttcaagagcgtctcacattcgctgtctatcttatactgtctggatcttgagtttttgcatgtgataagccatccactttttgggaatatatatgctgtctctgtcactgctatctgggattcagtttctagtttctgaccatagctcctcactcctaccttgtaggctcctagctcagtccctttctctccttctggatatttagttaaaagccttgccatcagatcaaaccggaaacaaaacttgatttgagcaaggtctgcatgtgtattaaaaaaaaaaaaaaacacgtaagaaacttgaattttttttagaagcaaagtacagtcagccctggtatctgtgagttccacatcgcattaaaccaactgtggatcaaaaatattgggcgggtcaggggaggatggttacctctgtcctaaacatgcacagacctttttttttcttgtcattatttcctaaacaaggcagaaaaacaattattgtcatagcatttgcattgtattcagtattatcagtaatctagagatgatttaaagtgtaccagacggtgtgtgtaggctatatgcaaatactacaccattttatataaaggtctggagcgtccataaattgtggtatccagaaaggaccctggaactaatccctcatggatatggcgggacaaatgtatatattcactgaaaacaacttgaaaagcacaaagaagcaaataaatctattagtccactattaaaaaattagtattgttaccattttagtattaatatatgcatttccaacctctgtgtgtttgtgtttgagtttgcatgtgcacagataaataaaatccacataagttaatgtccttttggtattctatggtgtaaaggtaatctgatttatttaaaataactgattccgaaagtatgttgcaggaaccattgatgatatttgagataactgtagggaacacctgagcatgtttgctttttaataattatatttttattttatgtgtatttgaaattctaactgctgcatcaaacgtgagttcagggttacggttactttgaaagcccattaaatgcgggagtctccagcacctttttggcatctcactcaggtgatttcgctaggtctccagtattcagcatgtcagcaatttggtcagctctaccttcaaaatacattcatatctcaactgtgttaccactctgaatgctactctcattcaagtgatccaggtgagcacggtttattcccatatctttgcaactaacaccctgctttagtcttttctcaatttgttgacttatctcagagtcaaagccagagcctttaccatgacctccaagtccctacacgatccgcccccccatctacaccgcatacaccgctctgtggcctcatctcctcccactcttgttgctcactctgcttcagttgcattggcctctttggccatttctgagcacgccgggcatgcttccacctcggggcctttgcctttgcttttctttctccttgaagtgttcatccccagagccctgctctcccacttcacatttttaatgattctcttctgttgggcacttacctgcctgccttttctaaaattataactcttttcctctcacggtttcatattctccttgcctgcttccccacggccccttggctgtattaccaacgtactacgtattttacttatcacttctctgtcctctaaaatgtaagttccacgagggcagggatttttgtcttgttttggtcactcctgaatctagaaaagttcctggaatgtagtatgtagtaggcactcaataaatactagttggaagactaagttaaataaaaatcatgacctgacttaataatagtaaatcaatacatgaggtataaggatctgtaaaagtcaaaaaggtgatgagtaatgcgtgaaaaacagtgatatgttgtaaatttgtttcttttgtggtcttattataattatcactgcagtaaatacccttaagtaatttttgggtatgtttatgattcttttcttaaaataaatgcttagacatataattgctggttcttaggatatgcatattttaagagttgttagacctagtccaatatatatcagattgtacttctgcctttaatgtatgagtgcctgtatttcttcgcatacttgactgtcctttgtctaagtgcttttttatcttaaccaatttaatggctgaaaaagctatctgaataccttaatttgtatgtctttgacatggatgagctttatttccacatgtctaattcttatctgcttaccctttttttacgaattgcttgctcacatctgttttggtctagactctggttgcagtggactgtaaacctacttgaattaattgtattggatggatgtcacaggcgttgggtttatatccaagaacaggatgcaaggaacagtgagacctcccagacacaagaactgaagggtctgcttctctctgccatctctactctccctttttttcatggcgtctttgttcctctatataactcttcattctacctggctttggtgtgccatgccacttagttcagcccctactttatgtgacctttcagttcacgtacccagtcatagtttaagtgcatgggtatccgcggcccagatttctagggtgagcagtctgttggatcagttttatcagctggtcactcctgttccagtcagctgaggtcagcatagagagctgaggctcttggggcctgttgccaggggctgtggatgaattgacttctctagccctgacacaaggatgcagtgattagaatgctcagtacaatgtattttgccgattttttgatttgttgtattaatctttctcttatgggtacccaaaagccctttccatttgaaggatagtattgccttttgtataatgggtgtttttctatccatttatcattttaattttgcttagtggtgttgccatgtaatcaaggctcaattaaatcatgatttctgctagtttctaggttagaaataccttctttatgaggaaattatacattcaaatatattttcttcaagttctctacattcttatctttcatgtgctctttgaattggattacattttagagggattagtgagagaaacatctttacaatgtttattgcaggagcatagtgtttatttaactgtaattcacttctctcagcaaaattttgtactttccttattttagttttcttaagtttattcctagctacttcataaattttattcttggtagaatttttttcagttatgttttctaactggtccctcatgatttattaaagctattgtttttatatttttgtaactgactatcttactagttgtaattttttgcttaatatttttgggctttacatgtcaacagttatatgcaagtaattattttatttctacctttttctattttttctttcatttctttttctcaatttattgtgctagatcttttaaaatgaggataataattgtaatggcaggtagcacatgtcttacactgttgtattttttagtgataattattctgactagataactaaatgctgtctagataactggaatgctctggtaacttacacagcaaatacaggaatgaaactagtggaaaactcattttaaccccaaagattttctccactggcttgtcttggagccttaaaatttcactcatttatcagtctttctggtcaaagcactgcctccacaaagttcctgttaaaatgtattatacctgctaagatggcatgtcacatatttagttatctgattattttctaataaatggtactggcctattgggaaagtgcaagatggacctcaagcaaagggaaaagtgttttgatggtgctgtcagtgtgagccttcataatgaagcagctgctcacctccaccttcatcttctgcctgctctgtgttcttcacactgtctcacctccgtcccacaagcttcaacctgagtgaatgtcccttgctttttaaaatatgtcttgttatcttgcctggggctttcctgctcctggtcctcagtgtcagtttcgctgtcactttctccaggaaggctgatgtccttagactaggctatgtgttctattgcattgctcctttaaagtaacattttaaatctttaaaaataacattcatctttaacatagttgctttttaaaaatcatctctcatggctgctcaattataacctcaaactgccatgccagagagcatatctgccttgtttactgatatggtttggctgtgtccccacccaaatctcatctttaattgtagttcccataatccccgtgtgtcatgggaggcacctggtgggaggtaattgaatcatgggagctatgctgttctagtgataatgaataggtctcaccaggtctgatggttttataaagggcagttcccctgcacctgctcttttgcctgccaccatgtaagacatgcctttgctcctcctctgccttccaccatgacgatgaggcctctccagccatgtggaagtgtgagcccactaaacggctttcctttataaattgcccagtcttgggtgtgtctttattagcgctgtgagaatggactaatatgttgaccattatgtctgacacacaatagtcactcagtgtttcctaagttaacagttaaaagggggttggaggataatgcttgacatgttattggtgaacttgagcaaccacagtgagctgtactggttggcagaagtagcggcgtagggaaattggagttgaaaggagtgtggccaataagcctgtgcccaaaacgtttgagttttatcctgatgtgaatctatgcagaactgaagggaaagcctgccttctgtttactggagttgtgcacagttttgaggaatttgaaaaaaaaaagcagttttatacatagatgacctctgtgcatccttggacgtgaagcaagatataaccctatactttatacttttatcctttaatttccttactctttagggttgcagtgatacatccactgggcttttacagcatctaaaatggcaggctggctcataaagtatgagaactccacctataataaagaccatatttcaagagctagagtgaaaaaggcagttggaggaaaacacaggaatgtacataaaagtatttggtgctgttttgttggcaacagaaaggaaggtttttgcttttgtgagcctggatggttccagtttatgaaaatgttttcagaagttaatacaaagacattgtttcaacttttctcaagttatagtaaacttacctttcttcccatactttttctattttttttttgttatatttattctgttactataaattacacactgaactcagaactgaatatgaatagcaagaccaaatccttttttggctattttctatagcttatttatttgcaacatgtcttcatgagggaacctgtttgatgtcgtgtttgtttgtttattttatttcatttgtttattttttgagatggagtctcactttgttgcccaggctggagtgcaatggtgccatctcagcttactgcaacttccgcctcccaagttcaagcaattctccttcctcagcctcctgactagctgggactataggcgcccgccaccactcctggctaatttttgtatttttagtagagactgggtttcaccatgttggccaggctgctctcaaactccggacctcgggtgatctgcctgcctcggcctcccaaagtgctgggattacaggcatgagccacggcatctggcctgatgtcatgttgaactgagggttgaccttggagaactggaactaaaaatacggtgatcaaactgattttatgtgaaattactatatgactaataaaattaagcaagttgagactgctaatcctggtacattgagttaggtggtactatacttaagttcagagccattctagagctgcagaagggtgtgtatttaatactttcactttacagatgaggaagctgagatgttaagtgacttgattgaggtcatgcaggcgtttagcttcagaaccagattaatagtagctgccctattttatgcacttaggtgcactcctaccccattttatagatgggcaaactgaggcacagaagcaaacgtcagagtcaggatttgaaccaaggtggtcggtgtcacaagtccttgcttttaacctctaagttgttttgcctctgcctcgctttctggataggcagtccattattctctgcccttaacaatgttgcctcctagaatgaatggtttcagggaagctccttccccagtaaatggctcttgtaggtattttccatagctgaaaatggtattggcctttccccaagatgctctgttctcatagatggtttaggttgaaagaatccagtctgtgattagagaaccctgaaacgggaagcagatacttccatgtctacactgcagtgggagcagtgcagccaaaggacagctacgccttccgaaggggtggagttcgggttatgctgcagtctttttatctcctttcgcgaccatgttgttctttaggtaactcattttttaaaaaagtttgcccaaaagccaacaaatgaaagtgattgattggataaccaaagtgtactttgatacctgatatctgctcctctgctttgaatgacagaagataatttctgttgttcttttaaacaagttgcattgtgcctgtgttctgtgtcctcctgggaaatgactaaaagagatgcccagaagttttggtgtataaaacttgttgtaaggcaagagtcacccacaatgagtctggtttaggtgtggtctattggagtttaattgggaacaccaaatataacttgagcacatttcagcaacagcacttgtaggacctaaaggctttaatatagcaaggtccttggagcttgaggactcagtgggatctggagcctatttcattcagtagaaaattactggctgggtgcggtggctcacacctgtaatcccagcactttgggagaccaaggtgggtggatcacttgaggacagtagttcaagaccagcctgaccaacatggtaaaaccttgtaggagttgtggcacgtgcctgtagtcccagctactcgggaggctgacacaggagaattgcttgaacccaggaagcagaggttacagtgagctgagattgtaccgctgcgctccaggctcgctgacaaagcactccatctcaaaaaaataaaataaaataaaataaagttattaagatttggtatcttcagagctttttggggaagaaggtatggttgtgattattattttttatttttatttattattttttactatcaggccctgtgaaacggttgtcttttaaaaatgtctttttacaaaattgtagtaaaaattctctcaaacggtagagtatcctttaattcatctcatgtattttatttcaagacagttaaagaagtgccctattagaggcttaacaacagtgctacgagattgtgaagtcatgtcagtcgagggtttccgcaggcttcatagagacatctgatttgagccttgcaggaggagtagatgtgtgtgctagaagggagaggacacctgaagcttaggaaacaataacatgagccaaagaccacatagtgtacaagggaaaaatttagtgggaaatgaggctcaagacttggtcagccaaacgcagcaaatctggaacagcatgctagggcgttgatggacgggattctataggcactagaacgttttagataaagggaatgacatccattctaattgctggggaactatggaagaatttggatgtatctcaagattcttgggttactagataaccttaaaactttctcccttgtgtgtgttttttaaatgagtttttagtttttctatggtatagagaacatacttttcaaattctaaatgttagataatttgcccgttttttaaaaaattttcttggagacagggtctctctcactgttacccaggctgtacagtggcatgatcacagcttactacagcctgtgccttcagttgatccacctgtctcagcctcgttaggagctgagaccatagacacatgccaccatgcccaactaatttttaaattttcagtattttttttttaacggagtctcactctgtcgcccaggctggagtgcagtagcagcaacctctgttcactgcaatctctgcctcccaggctcaagccgtccgcccacctcagcctcttagtaactgaattttatattttcatttttagtaaagacagggtttcaccatgttggccagcctgatcttgaactcatggcctcatgtgatctgcttgcctcagcctcccaaagtgctgggattacaggtatgtgccccgatgcccaattttttgtttgtttgtttataatagagacagggttttgccatgttggccaggctgatctcaaacttctggcctcatgtgatctgcttgcctcagcctcccaaaatgctgggatttcaggcatgagccacctcgcccagccccagctaacttttgtatttctttgtattgattgattgattggtagagatgggagtccaccatgttgcccaggctggtcttgaactcccgggctcgagcagtctgcctgccttggcctcccagggtgctgggattacagacatgagccaccatgcctggccagtagtttgacttttcatcgtaaaaaataccttttgtcaagagaattaaaaaaaaaattgtgagtaagatggctttcttgtatcgaagcttgaatgtggtcacttggttgttgctgtaacgtataaatgaacttgagtcttgaatgtttgtgggtatttcccattactaataaggaggtacaacaaagccttcaatggaagaaccagcaactataaaactaaagtcattttttgggtggatttttggctgctttctatagttggcttaggagaaaaagtagaaagctggagtatgaggatgatatgtttcctttggcaaatctgtgacatggaaattaccatgagccaaggagccagaggacatagcttgtagctctgctgcctgcaacttttaattatgcaattcagggaatagctcattaacctcattttttttgtaaaaaaaaaaaaatatatatatatatatatatacatatatatattatatatatgtatatgtatatataaattgtctaccttgtatggagtttatgagacccaaatgatttaagtgttgtgaaatactagcttttgcttcttttttttttttttaatctgctgccttcctaaaagtctggcttatctttgtgttgcttaaaggttggctaaaggcactatgattcaccaaggtgttcaagtcagaaaccttgaagtctaccttgagtcctccctcttcttcatctctcatatataattggcctcaaattcaaccggttttacttttttactcacaatcctgctccatccaccctgtattgattactttacatggaatccttctcatctgtcacctcgacccttgcaggagtctgctaactggacctacccccatcttcagtctcaccctcttaaaaaacactctcatagcacttacttgccagatactgctttaagcactttataaattccaattcatttaatctatctatttaatccagtcaccttccataataccacctagttaccgctcttgaatctggccatttttcgtacccacttaaagtcttttcctagctcccttgcctaagcattccacgcccctctctgactgccccatcttcgcaccctgtagtctagtgacattggctcttgcactgctttggacaagccattcagtcttacacgtctctgtcttctgtgacctatccctggtgctgggaaaacttttctttcctttctctccacctggtaaatgccacattttggttcagggttgtgtgtggtgtaaccttttcccattgaagcactagttggtccattatttctgtcttgcatatagttttctgtgcagagtttgtgttcactctctagactatgaagttctgggtatagggagctgtattttgctctttattcatatggtgcccggcaggaggtgtggatgcatgcttggtaactgatatcagtgagagaactttgttttcctcttaagctgctgctcttaactgtgacattaatattggtacgaaacaatgtcagaaccatcataccattcatatcactttggtatgagctgatactattatcataccattcatatcactttggtgtgagctgataatattatcataccattgatatcactttggtatgagctggtactaattatattatagcacttaaggcccaggacttacagtacatttgaaaggtagaaagtacactgcctctggctttagaaatattcatctcagtgttgagtacaaaatgaaagttgatcctgggtgtttatagccataattagatttttaaaaatcaaaaacaaaaccttcaagcctttccaaagggcctttgccaaacttatggaggctgacatgcattcttcaaacttcaaagataacacagtagatgttccaaaatcagctgtaggtaatatgactctttccttctttgatggtaacatttcaatttatattcccaagggaaagatacaaaagatcttgaggaataatcttatttacatcacagggaatataaggtaataataaagtaataagatgtgctgtttgatgagccatatagtaagttggactaggcaagttagaagggaaattgctactgatacaattctctttgggtccagttcatgtagagagtagtgtaattgtaacaggattctccagagaaattgaatcaataggtgctatctatctatcatgagattcattatagggaattggttcacgtgattacggaggccaagaagtcccacgatcggccatctgcgagctggagacccagggaagcctctggtgttgttggaaggcctgagcgacagagagctgataatttagattgtagtctgagtatgaaagcctgagaaccaggagctctgagggcagaaaagagaaatgtcccagtttagcagtcaggaagagattgaattcagactttgtctacccttttattcatttaggcctttgggctttggatgatacccacctacattggggagggccatccgctttactcagtccaccactcaaacgctcatctcttctagaagcagcctcacaaacacacccagaaacaatgtttaaccaggtgtctagatatcctgtggcccagtcaagttgacacgtaaaattaaccatcccaggacctttttgctgtagggggaaatacggaagaacttgattctgatcaaatgaagagactgtgaatcgactacatagatccctgtgggatgtgctgattttgctaatgcttttaaagccagcaatgagttgcgtgtggaggttagggaagagatcagattttcacaggttgttctcagtccattgaaaatattgatcagttaaaacagtaatgttcaaagtatgaatcataatttcttaaatcatcctctcctttgagctgggactggaaaaagaagaaatcatcttcattcaaaatactgaaaccctctgagttaatttgtaccagtgaataggattctcttcccctcaacactcatatccctaattattatttatcctctaataaaatacaaggtagttacggtgaggatgcttatagccagtggacactgaatgcctagttagaccatttgtgattctcaaaccgggttgcaccccagaacctgtgaatctgactcttgggggtggtacctggccatgtgtgtttttaacaagcttcccaggtgactcttacagacactgaatttggagagtctggtggtcttcacaactgacaactctaaaaacctactggtgcagtagttttctaaatttgtttagaacttaggatgccttttgaaatataactaacttttgggttctcaaactttaggtctgagatgggacctaaagttgcctctaacaatttcccatgtagttctaatacacacataagtttcagggactgcactagtatattgtagtattgcagaaaggcagggtttttcaaattctgtttaggtacaaaatgattcatagtcaaataaatctgagaaatgctggaaagttaaaacattgtatgtgtgtatttttttatagctttgatttttcagagcctagagcacactagggttttatagaatactgttttggggggacttatggaaagagggcaattcttgtcctcttgtttgttcaaatacttgactaaaaggatgatgctggactcgtgtatgccctggcacgctggctgaagtactgtgtgttattgatactctgcctagggatctaatttgactcttctagttatctgtatcgcagtcaggtgttgacaaagccatcttgatctctgttcttattcactgcttcccccaaacactacacatttctttgtagcatttaccatagataataaagtgtatgccttagccagtgatagatggcccctgaatttattctgggaattgcgcagaatttaatttttctatttctattttgtaaaatcaagaattctgggaagcagaaaccattaaagtcttaaatatcttaagactaatacctaattttgagttactgattttgtttaatccccacagtaaccctgtaaggcaggtgttctgatccttagtatttacagatgaggaaactaaggatgagaaaggtgacataatttagagctgagacctgaactttggtcggcttgagcctccaaatttatcatttcttttctcttcaccatgttgccttcctttcaactatataagggcagtggaatgtttactgtggaaggtactctaggactgaagacagatacatgtggttaattctaactttatatctaagtatctttgtgtctttggaaaattgacatagcctgggtctcactttaaaaaagttactgattttcttagagacacggccatgtctgtcacccaggctagagtgcagtggcatgatcatacctgattgtagcctcaaagtcctgggctcacgtgctcttcccgcctcagcctcccaagtaggcaggaccacagacatgtacagataagcctggaaatttgttttatttaggcaaggtctcacggtgttgtccaggctggtctcgaactcctaggcttgagcaatcctcccgcctcagccacccaaagtgcagggattacaggcttgagctaccatgcctgacctcactttttctccactaagtttatagtgctttctaggccgccttgtcagcgtattaggaaacacttgtgaacatggaatggggtgtgtgtgtgtgtgtgtgtgtgtgtgtgtgtgtgagtgtgtttaagataaagcaccatgtgtaattgtaaggagagaggaggtatggtgtcctcattttcccaaaaacttaggcaagttttaaatggtatcaatgagagttacatctgcaagtattttagttgctatggagtgactagcatgtgacagtactgtgtgacaaggtgtagaaacgtcatctcttgggtgacttgcagctggtgacattgcagaattcaatgataagttgcggaattcaggatctcttgtggcaggacccagaaggcggtttgatcatcaatagggcaggacttttcatacctctagtgaataaaggggaggggagaattcacgcctttgctattattgccactttacttgtattttgttcttattttgagtggctagggtaaagatcttttaactgatttaaaggatgtttagtttttattttatcagccctagttccaatgataggaattcaaaatgtaaaacttagactgtctagatgacttgattatagttgaaggagaaattttaaagcgagcttgaagaatggtgccaaagtgcatcttattttctgcagactccgaagaaaggagtgtatcctctgaggggaagttccagactggcaggtctattttggcttcaggtatgcttttctagttattgaagtgataaggttttttttttttttttcctgtctctccattctcccttttcctccttctttataaaaccagattaatattatctattatatgctttagaaataatattaaagaatggagcttaaattgaaacttcaagagctgattgattggatcggcttgccatttttggagtgagcacatgtgctggatgggagtgaggtagtgccaggacctaggagaagcacatttaagcaaatattcttgtgctgtaaactttaaaatacctgaacctggtcatctgacatggatttttttatttgagaagatgagatgtacatggggttaatatactagggaggtcagcatatgacttttccgtggtgaatttcattctgaaatgtcagtgttctctgaaagtcataaaacatgagtgcaagctgttttctgagttcatctctgatatgcagcttcttgaggcagatagttgggaattgcttagtggttcacactgatagcttatgtcatttaggtcaggaggcagagactgtcgctagggagatattggcgtaggagggacagtttgacacaggacatcacagccaggtcacagacttttgccattttaagagttgaatttgaggatgattctactttattctcgcaccaggtggagtattgctcttaagagtatgtttgtccagcttagggggtggtgaaggggtacttggaacacactcccggggatggactgtactactactaaaggaacaacacaggttggttctgctgtcaagtgatgcctgaatgatgtcctttggagaactggatgggacacaggacagactttatttagggctatgcatcatacttcttcttaggatatttctttgtatcatgtacaagaccttcccatggccccttctcaaccaaagtttctgtgtagaaaaaaaccttattgtgtaaatctaatagcttagcaaaagttggaatgcctgtttcacaaagagtgtgttgcatgtagaaaagatagaaagtaaataggaagtaaacaaaaaattatcaaggtggtgaaacaaagaaaattttttttcttttctgaaggacttttacgtctttattgtctttgctaagggtactaaggtgcattgtgactctgcagtcgggggcttagaagttaaagaactcgattacttgccagtcttattttttcttaggatggaggttgtcctctaagcaaccatttgtgtgtgtgtgtgtgtgtgtgtgtgtgtggtgtgtgtgcatgtgtgtgcatgtgtgtgtgggtattcccttctcaaaacacttgaagtgagaggctaaattatgacttaaaatcaaaattattatttgaagccatgggtatagaagtttaagagccacctggaattggagctttgttattggggtgtgtgtgtgtgtgtgtgtgtgtgtgtgtgtgttgtgggggtcaaaattttggaattaaaatgacattgctatttaatattatctgcagcagtgtttgaattagctggaatattgttcatttccatagaaactggtcacaaatgagaaacaatattattcagttttgttaggaaaaactcaagagcttgtaattttgttaggccttgattataaatactggtcttaactaattcacgcaaatttcatccaacctgtaattttttttcatgaggaatagttacctataatctcaaggtgcagctttttggaacctggtattattttttttggaaaatgaaaaagtaaaattctaataataatctcaaatgtattcttagtctctaataatagcagtgcttacaaaatatcattctcatttagctacactgaaaaatagcattttaaaaggcgttgaatagagagaatttctgtagctttttgaatggtcttgtttgaggaattggccataaaactttagaattaaatgtcaaaaaaaaaaaagaatttcaaaataccttgttttgcccaaagcagaaggaatttttatgccgtcattgtttgaatgtcatgacctataaatgaaaataaacagaataaaatcttgtttttaaacattaaacgttaggctgggtgcagtgactccatgccttttataatctcagcatttggggaggctggggtaggagaattacttaagtccaggagttcgagactagcttgggcaacatcatgagcccctgtgtctacaaacattttaaaaattagctgagcattgtgactcacgcctgtggtcccagttaggaggctgaagagggaggattgcctgtgcccaggaggctgaggctgcagttccgccactgcactccagcctgggtgatagagcaggatgctgtctcaaaagagaaaagaaaaccagaattaaatgttactgagttttaaggcaactgcatacagcagactgttgtatttgtgggttccacattggcagtttccaccaactggagatggaaaatagatttaaaaaaaaagaaatggttgcatctctactgagaatgttcgtatttttttcttgtcattattccccaaacaataaagtataacaactattaacatagcatttacattgtctaggtattaaaagtagcttagagatgacttaaggtatacagcagagtgtatataggttatatttaaatactgagtgccagtttatatcagggacttgaacatccatggattttggtattttgtaggggagtgttctagaaccagtaccccacagataccaagggatgacagtactagtgaaaacaaacaacatcaaattttttgaatctaagatactattgattgggagataagtcagtatcttaatttattatattttatattttacatatttaaaagtatattttcatatattttctgctactgccagaaaagaatatgccatttcacttggagaaaatggtgttaaatacaaaatcaagaaaaaaaaaaaaaaaaggaaaaaaatgccagcaattaactatgacacagtgctttctcttggagtttctaataattcttaaacttacagatttttacatacaaatgactttggcatattctcgatgcttgcctgcataaataatacttttgtctcagtaccttttatagcatctttttgaagacactgtaaacatcaattaaatcaagattaaaccaacagtataattttgcgttgtgcacaggtaataaaagtctgacagccacctggctgccagggttcacactggttgatgcatgagaaaaccattctggctgggtgcggaggctcacgcctgtaaacccagcactttgggaggccgaggctggcagatcacgaggtcaggagatcaagatcatcctggccaacacggtgaaaccccatctctactaaacagacaaaaattagctgggcgtggtggtgggcgcctgcagtcctagctactcaggaggctgaggtgggcgaatcacatgaaccctggaggcggaggttgcagtgagccaagattgcgccactgcactccagcctgagcgacagagtgagactccatctcaaaaaaaaaaaaaaaaaaaaatccattctaattttaaagaatttgaaatatttaaaaaatgtgtctaggaactaatgaaatatgaatttgtatttacatagttttgccaaaaacagcacttttgccttatccctctggagaggttcaggggaagagtttggggagggctttttttgtttctattgagtagcatctctggctgcttctgtcctcatcccctcccttcatgaaggctcatgatctggttctgaaggattctttttggtgattcaagctggtttgtgctgcctgttactttatcctctcctttagactctgtcttttttagtttccttgaaaaatacttgtcaaagtatttgttgactaaacctaccctctggaaagcctggctttgtcaacagctgtttaccttgtcatctctgctgtatacaatggtgcagtggacaaaaagtgttggatttggagtcaggagttctgtctctgggtaccagttgttttgatatgaacagtcgttaggtagtcttgccgggaagttctccagttcactttcttaagtccttgtggcctagaggtaggtgcttgtccagattactccacaattcctctggatcacatcaagggtctctgatgtaacaggcagacatgccctgaattctgcttgtttacctgtgagccctggcagggatgacttttccccccaacccacctgcccccatttatcagtccaaggggattcctatttaaatttactctaacaatctgttaggaggttctgactgtcactaatataagattataaatgtaaaggccttgtcacattttagaaagccagaaaatgcaatgtttttcttcccaactgattttaaagactcttcattctttctttcctttttttgctggttgttggggggggtatggagaggacattattcactaaatttgttgtctactgggtctctttaattctcagtttatttgcagagcagattgtcctgtcttgtgcccaataactgaatctgttccagcttatgtcactaacctctttttacctccaaaatgccatgatttcagtcttaaaataccaaacactttgagattgagttagatggcagataacatctaattcacattaaagaacacagcgctcaccctcctcgccttacaggtagtttggttctaggaggcgctagtgtgaaatcaaagggcaaagtaagatcatgtatagctccctaaaaaaaaaaagtagctccctactttaaaatataataaatgaagggaaggaaaaactagtttaaaagcgtagaaactgacaacaatagttgtctttcataaaggtaacgtaggctggacacggtggctcacgtctgtaatccaagcactttgggaggccgaggcggatggatcaccagaggtcaggagtttgagaccagcctggccaacatggcaaaaccccttctctactaaaaatgaaaaaaattagccaagcgtagtggcaggtgcctgtagtcccagctgctagggaggctgaggtgggagaatcgcttgaaccggggaggcagaggttgcagtgagccgagatcgcgccactgcactccagcctgggcgacagagtgagactccgtctcaaaaaaaccaaaaccaaaaacaaaaaacgtaatgcatataatctatttagtaatcatggttttagttttcttaggttagatattaagagctgaagaccttcccctcttcaccgctgcattctgtccactttgcttttgccactttttcacgttgctccccatttggcaacaataagggataagcattaaaagatctgcaacatagagagagctcattggcagatgatttccgctgatcagagtctctagattccgtaataaggaaattgcttacaataaaactcagaaactttcagctttgtatacagattcatgaaagaaaacatttgaattactgcttttgggcatcttctactcaagttgatagctgcattgagacgagtacacagttgtttgacttttcctttaagcttcttgcaatttgatttaggacagttgtactgagcgtatgttaaagcccagccattatccaaggtgctgtgttagaaatttcattaagataaggattcagccttagaaaaatcacagactagccctcggggcacagtgctggggagagtatgctctgaatccatgacctacagggtgaattaggtgattgataagagtctggacccttagatgatgtgatggtcatggagaggtactgcagaattacagggggaactgcgaaacagcccacgaactttggaagctaacatgtgtctaaagtacatatatgatactaataaccttttgtaaattgttgtaccttctccgattgtggaagttggagaatcggcagttaattttgaagcttccaagtgattgactactttgaaattgtaagtgaattcaggccttccttgggactctttaactcctcttccccttgctcactcctctccagccatggaggctcctctgggccatcacttaaaacttaccaaacgccatcttgcccaggcctgcatttgtttgaaatgatctgaagatagcttgcaaagccacatcctcagttccttctattttctactcacatggtactttctgagtgctgtgaataaaatagcaacccctccctctcctcttgcatacctagctatatttatctccaaggcacttatgaatgtcactgtctgagtgtaaactccttgaaagcaaggactttcatctgttgatgctttattagacctaatatttacctggaacagtgtgtgagtcgtaacatgttcagatatttgtgggagggtgaaaggcaggaacagagggaaaactcttcatgtattttattgtttctctctcttattagaaggtaaaagtccacaagggcaaggctgcacccctagcacttagaaatgtgctggcacatagtcaatgtttaaataaataattggagtgaaaatttgtgcaggtttggttgtgtatacttaattatgcaaccatagtaaacacatatacagatgtcctttaaaaagtagaaatgtttgttcctatatacaccaaagttatgcgtgcagtataacctgtagtaatatcggttagaaagccacatagcttattagttaagaggctgaatgcacaactgcagccgccattgctgagccccaatcccagctttacctcctgctggcagaatggtcatggcaaagttatttaactgcaccatacctcagtttccttttttgtaaaatgggaatgatggaagtacctatcgtaaggtcaagggcattaagtgagttagtataaagtgcttaaaatagtgtattaaacagagtaaacattctggaattcttcataaaaatatgttaagacaaaatatttattgatattattactaattcattcatattgggtactaaagagtggaaacgtcccctgttaatcccatagccccagatgaagatgaccctttggatctgtctccaggggagctggaatattttaaagagatgaaagcaggaagtgacagagataggattttatttcctaaggggagggtcttactccttgtattcttgccagggtactaattctttcctcttttttaacattgcacacaaaattaagtgaatccaagaaaccttccctatatcgcatagagcagctttcagtgtagttgtagtaggtagcacttaggggaaactcagtgtagagaggatatgttgtcaggctgctgctgtagaaactgcctgtagcgtgcataaagagaaagtgaagttatgtgcaaggtgagaccgtacggccatgtcgtcagtgggtgtgtcagcaggagagggacactgcagaacagatacgcagttccaaacacgccaaagagaaacacagcaacgcctgtgctataggacactggaaaaggtgtcgtaagaatttgaagaaaggggctggacgcagtggctccctctcataatcccagcactttgggaggccgaggtggagagatcacttgaggccaggagttcgagaccagcctggccaacatggtgaaaccccatctctactaaaaatacaaaaaaattagccaggcatgggggcatgcgcctgtgatcccagctactcgggagtctgaggcaggagaatcgcttgaaccctggaggtggagattgcagtgagccgaaatcatgccactacactccagcctgggcaacagagcgagactccatcccccacacctccaaccccacaaaaaaaagaatttgaagaaagggcagaatataccaatagagatggtaaaatttggacattatataaccatagaaaatatttgttcagcctcttgtatcccagaagatggaagagttagaagagaaaagggggtgggagcaatgggaggccagaacttctctaatattccctggctagattgtagcatttattacctaatcaagaaaggagagtatttgatcaaactaaattcatatttataagtatattttacctgtgcactagacaggaagtgagtattctaaggactggtggtggtgtgggtacccagctctttaacataaacactaaacaaactgtttaagatatgaaaattgtagttcttatccacataaggcatgtctactttgtgctttgtgccgccttttgctgcccagcttctgatgtccagtgcatatacactgatactaattcaacctgacagaaattcagacagaagagaatgtccaatggcatcttaagaagactccagaaaaatgagttggtcagactgtaagtgagtcactcttcctgtcttgtccaccggaaatggggctcactgatcctaccttgcccaaagaagcttctatgcaaacaatgagcatatacatttgtttgcatctaaatgtatttctatttctaaagctggatatccagtaagagtttctttgcaaattattcatttgaaatgattgtaatatgggtttattaacattgacttgcacatattacattctcatgtgagagctatcccacaagagcagcaacttagtataggaaaataaataaataagtaaataaaacaaaaagtgaaaacctgcatcatgcccctagaaacgtttgaacccctacatgggtgaaaagtacagttgttatgttggaagccagtgcctcaggagcaaatgcagactccccgactcatacagtgagtttgggtcattttccatggcactgccttgcatgtgggtgccctcttctggaatagtgaaagcaaggctgagaaaaaggactgagatttggaaggtatgcggcgggtggggctgggggcagaatctgtatgtgatgcttactaaaattttttattggtgaagactgaattttgtcttctgtgctgaacagagaaatagctcttaggaattctgctaattaggttttgtgtgtttcctttataaagagtcttaaatcataagaggctgtcccttccagggaatgtattctatgtaactgttgaaaacaggttcatttgagacgtttgtcctaagtattcctactgagcgctaactaacatttgtatggagatttatatttaataaagtgctgtcatgtattatctcacgtcatcataaccttaatgatgctggtggtgttggtgacgaagatggatctggtgataggagcagacgttttttgtttaccgtatgccagacatcttacatgccaagcatcatacatggatcttctcatctcatcttcacaacagcttgtgaatatgatactattatctgttttatagctaaaaaccttaagggttacagacaatgatgaccttacctacctaaggtcccagaactggtgaccactggagccagtgtttgaacttgggtggtctaactggagttctccagcagataattgcttttggcatcttctaaattaataatcattgcttgctggcaaactgaacactcacaggtagaatttcctgaacaaatgaagggagacccctgaattcttctgttgtaacagaattcaaatgaatacactactgctagacatatttctttggcgcactttggtgttctttggtcatgttgagtgctctagcctctcccaggtgattccctccaccaacataagggtgactagttcacatctactgaattcttgcagacaggggatggttgccattgctaccagacagctctgcctggttaacctgtgtgtaccttgtacctatcgtttcttcgaaccaaactcctggtcttccacgagtgcttgtttctttccatgtgtgcacactgttacccattccctcttcttcctcttgtgttcattgtcttgtttggtggcatcaccttccaccagcttttaagtcagggttagtcttgtacccacccttgaacatagctccatgcacatctcaagccactcatcccgttcttccattttaccttctaaatagctttcggaggaggcttttccttcatattcacacagacacgcaatttagtttctcatctcttgactgtactattctgataccttttgtagctggtttttctgtctcaattttgagtccctgcagttttccctccacaccacaagcaaaactgatcttaccaaaacccaagtctgattgttgttcctctctttagacctatagtgacttcctgtgtgttagaggggtaactcaaagctctgacagtgcatcaggatcatcttggtccttaaacagaagaatgccagggcccaccgcaggccagcgactgagaattccctgcagtgcaccctggcacgtgtctttcctgaaatctccacgtgtcctcacatcctacttggatagccaatggacatctcaaggtgaacacatcaaaaatggaacttctttttctcacaacctgtgttaactttggtctttcatgtcttggtcgatggtaaccccacccttgaagttgctcaggactaaaacttaactactattctctcagccctcccaaaggaccagttggcaggtcctccgggacctatagcccctactgccacccaagccagctcctccctggcacatgcattaccccctgactggtcaccctgcttctccagtctattttcaaagcaatacttagagtgatcctttaaaaatataaattaatgttagatctttactcagaacccttcaatattaaccatttcactaggagtaaaaaccagtctccatagtggcccccaaggcctttaaacaacaaagtcgttccccaactctgcagaggtgttctggggcattgcagtgagctcacaggtgtttctcaggatatttaaattgtcaagggaaacacagctctcctcatcatctgtcaaacatcatgtgaacagctagttcagcgtcaacatcagattgtgctatattccttttgacgtcatagctttgagctggattttcaccagttgttgtgataaaaattaagtgctatgagaaaacaaatgagtggcggtgttcagtctgatccgagatttaggaagtcatatggcccagaggcacacacatctattagtaagcaatcgttatttaataataaaaatgatttttctttcaatttgtatgtattgttttttcaaatgactgtaaattgttgggtccaaacttaataagcatttatacactattattctgttactaaatggaatatatttcctttggccttggagtgtcataaaaaacttacatattaaagactctgagtcgagaaaatgtgggaacctccatcccacaagcccatttgctctctgggtattctccgttcactgcctctgccccagccactctggctttcttgcttgccctcacacatctaacatgctgcagcctttgggccttctctgggcttggaatgctgttattttatcatatttgcaaggcttatctcctttacatcttgctcaaatgttgccttctccatgaggcctaccatgaccacttcgtagaaaaatgtttccaccctcatccccaaattagggttcctcttctatctttgctctatttttttccagagcaaacgtcaccttctaatatgtagaatttacttatttattaaattctttatttttagctcccctccccacccagggtagaagtttttaattctgttttgcttactgtagtctaccaagcacctaaaatatgtggcacagtatagggaattaaatacgtattcattgaatcattgaagacagacataccagaagatgactggcaggagcaaaatggatagtagtaaagcttataaaagtagtaaagcattggagtctcactgaccatgtccagctccttgcctcagttttcccatctgtaaaatgggttatactattgcctgtttcataagactgacaattcaatccctaggaagaagcccagaggctggcacatagtaaatgcctaaccattgttaacctattaggtttatggtaccatggtgggtgctatggctcttctgaataacttctcatttacatttctttgggaattagatgatgtgctctctacaatgcctaggaaataaatgccatagataatgatggacaaaattattttcttttcccttttcagaggcaatttatgatttagggttttacttattttttgctgatggtgtacttacttctgacttgtatttcagccctggaagctgtgcgtttgtacccgccctcttgtctgttggttccagtcttctgtgtttctatgtcatcagcctgaagaatggcaaaggagtcatgttgttcccactggtctttttattccacttgcagctgaagtcatttcttctcactccttgagattcttctaatttgcctttgcctaagttatgtataaaattcaactcgactaggtggctgttattattttctatgtacaacccttggggtacactttataaatacagggtcatacagggagctttgacaccttaacctaacttctttttggtcctagttttattaccacaattacataaaaatttaaagaaattttaaatttaaattcaaagtatactattgcctgtatgaaacgggcaatagtatactgtttattaaagttctgggaaaaattgaaagtaaaacagtacactattgagtatattgttttatacaggcaatagtattctactgatgtcagtttttttccaggattagctacagtgaattggaaaattagtgccacataccattattgatagcatagcatggaagacagtggaggaagtagacatggcagatggctgtgttcttgcattctcttagcagatggctgttgagtaccttcagccgccccttgtgttgaggattcaaaccagaattcaagacagtggtaggtgaaagcgatgagattttaaaagatagcactaagagttcacagaatttggcatggtagggctgggggtgatgagtgtggcaaagggaacaacatacgtaaaaggcatgggagcacagcttgtatttgtgtggttcaagtaggagggaaatggtagaggacaggttgaaaaaagaaattggggtcagcttggaaaaggccttaggacatgctacagaatatggatcttgtgtaggatttgtgtaaagtggctacattatcacatttgtggtggtagcatgcaggtcaagagagaaggatgaaaacacagaggagggtttttgtgtttttgtttttgttttgttttttttgtatttagaggacgttagagaagaatcagtagattataggcaacaaagtcttgataaaactgtagaaaaacagtaggaataaaatcgcagaaacaagtgaaaaaatccagaaggattctaattgtgaataagctaccagttggcaatcatggaacaccattattggaattcttgaaataaagtttagaaaaaaacatttcaggaagttttgccagataaaatataagatgcctagttaaacttgaatttcagaaaaacgatgaataatatttttgtataagtatgtcctgtgcagtatttgggacgtacttacactagacactgttttttgatgtgaaattcaaattttattgggtaccctatttttatttggaaaatctgccaatcttagtatgattcaaaaggttgtgagaaggcatggtgatcagagtcaatgatctggtccttcatttgatgatgcagtgttttgatgagagaattattaccatgtttacttggaggtcagaaataaaggccccagggaagcattttctagaacacagggagaaccttttgggaagtctcttacacatttaagtgactggtagggatttatttatttgcaaccttactaggctgtaaagtgatttgatcaagaaaaagagggaaaataaaacaaccatagaaaagagaaaatccaaactacagaacgcatctaatgctcagcagactagagctgcaatgtcttgtgtattcaagaaaacaaaatggggtgttatcccctccgagagggatcactgagttggctttatcaagtgtgaacgaggctgggctcactgtttcttacgttctcgatagacagtggcccttgtgttctggctgctgtttttattagaactgcagaaacattacagaaaccgcaacaatgaacactcggctgagaatgtgaggtcatagtagtgtgacctcacagggagccaggttcttggaaggctgtgaggctcggcagtcactgaacttgggagctgaagaatactggacggggcttcggagaggaaggatggtccaggcgcaccccaggggttgcgatgggctcttcttggtgtctgtatggttgctggtaagtttatattgccatcatattgtcaagctttctgatttaaaaggagcaattccggttcttgttcaaataatctcctaaactgtgaaatggacagaatgaagccatctagggacatatttatcctttgtgctttattttctccttttactgaaacctttttgaagaagatccagaaagtctgatgcacacagattttgcaattatatggttttggtgaatgtgaggaaaattaggtgaaatcatctggactgggcagcatagtagaaaaggggcaaatatggagaatgagtaacatgaggaatggaatgattttgggtaataaatttttaaaatgtgttctcattagaataagcctcttgtatttgaacaaaattgggccagtactgtatatgtggtataattacattgtttgcacagaatgattaaataaatgccatgaattttccctgggaaatgagcagtgagtagtggtttaattaagaagaaaatcctttctttgacatgtgtttttactacatgataggaaaagcacacatggaaacacaactccaagggctttgttttgtgttttgtataattataaaaagtacttgattgtaattaacgtagttcttggaataaatattttacatttctgtcacttgtatgggaaaacacaaagtaaccatgaattgcctaaaagaaatttctactgtgagttttcttattataggttatactgtcgataatgattattcagtttcctgatgggatagatttcacaaaactgaatggtagtgttaagtctctttttaaaaaaatgtttacatcatagacaggagggtctcaccgtgttgtccaggctggtctcaaactcctgggctaaagcagtcctccccttggcttcccagtgtgcagggattacaggtttcagccaccacacccagccatgtaatgttaagtctataaaggaagatgtaggatgaaaaaatcatgcatttaaaaatgtattttcatggagattttatcataatgaagcaatttattttaactggtaggcatgtgtattgggaaactgttcaaggtgttgagggttaccatacatgttagtttgcctgggtcagttccagttaatgcctgctgttctgccattgatattgactgtggtttggtatttgacttagagttttaataactgaactattaccattaatagctatggcaaaataagccagcatgggtttggtagacctaacttcgtattcccagcttctcccatggtatcatctgggaatgtgtgagttgacatttttacacagttgagtctaaaaaactctctctcttttccctattcttagagcttcatttcaagggcaggatgtcaggtgcttgccgataaagtgtgcttggagaagagttgctaaggacagttaactccttctaatcctgtggtggttgagggagtatgagactttgcagctacttgttataccagctggttgtccaggagccctggctgctttttcagtgaccttgaagcataaggccagtgcttccttggtagagcagtgggaaaagggaacttgtaaatgaggtagaataagtgacaagatggagcagttctgcttagaaatgcatttatttttactacaatggtttttgtcatttcgtgatgtaagtttacaacctattttttaggttcagatttttaaaaacataacaccattgagataattgaaatactgtatcacttgctttattaaagtataaaatccggtggtttgggcatattcagagttgtttagtcgttaccactgtcttaaggatgctttcatcaccccaaaagaaacaatgcccattagcagtactgcttttttattgataatgccttctttatttattttgtaatgattataatagaatatttaaggatttattatctccgtttcccctttagagtgtcctggtttagacagtaaatggttattgtgcttaatgcaagccaagttaaagaactatgggatagagcaagggcagataaactcccatccatgggcccaattcagcccagctggcatggctcttaggttttttaaggttgtaacaaaacaacaacaacaaagcagcatgtgtgacaggggccatatgtggcctgcacgcctacgatatttattatttcatccattatggaaaaattctgaccgcccttggtttagcatctgtggtaagtgtgttcgaaggccgtgtaagcacattttattatgagcatgtcttacttccaagttaagataaagatttggaaattaatgtatcctcattagtttcactgttataaatacaagagaaccctctatacctgaccacaggctgtagtctttaagccctttctagggcggagttctcaacgtgttgcctgtggagctttcttccttcagttaggtttatgagatcaaaattgttttacactaattattataacactatttttgtttttcactgcgttgatatcttatggtgcaaaaacaatagtggaggtcttagtagaacttaaggcagcggcaccaaactcttctagtcatcgtattctccactgtcatgcactcaaaataaaaatataggccagtttcacctttaaaaaaatccttgatgaaaccagtacagtttatttcatttcagcgcttgagatcatgtctttttaattttgtgtgtgatgaaatgggaataaagcacttctgttcctggtagtctccaggaaaaacattcgtctgtcatttaagttggggctaaaaactagtcacttttttcattgaatgtcatttttccttgagagaatgactgacaaactatggttattggcaaacattttcttgaaaatggagtaagcctattactttaaggaaaacagctgataataatttgtagcaaatgattacatttgagcttttgaacaaaagttaggattttggaaaacttgtatctgcccgcaaaggtttggcagcttcccaatacttagacttttcattaatggtgacattagtgaatatgatttttttaaggttatataatgaaatgtgtcaacacatgttttgcagataaccaatgtgtgatgttacaaaatcatgtaagggttaaaagatccattcaaagtataagatagattttaatataagagtacaaaaagttaatcgacacaaatttagattccatattgcaagtaagaatatcctttaagaaactaccacttgtctcactttggtgttgtatcaaaaaagaatatccacaattatctgaaaaggatattaaaatatttcttttttccaatgaaatatgagtgagggcacattttcttaatgtgtttcaaccaaaataatatattgttactgattgaatgtagaaatggctcttagaattcaactgtcttgtagtaagccagctgttaaagaaatttgtgttttaaaaaaacagtgaattttagttcttctggaaaacaatagttgtatctttatagtatttgttatgtaaaacagatttatttttaagtgagtgaatttttaaaatgtttctattttcattactacgagggtaaatatcggtaggtataacccacataagtgaaagccgtatggagtccttctaagaatgtaaaggtctagagactgaaaagtttgggaactgcttgcctaagatttaggcaatctgttctttagttctttaaaatatggtaactgaaaaaatttttatgaatatttaaacatacagtgatctcatctaagtgtagctgaactaaaagaaaactatcaatatttcatcagatattttcctttttgccatataagaaaaatctattattttctctctttatcaattatcatagcaatgctggggtgaaaacaacacggctagaagctcattctgaaatggggagcactgaaattttggaaaaggagaccccagaaaatctcagtaatggtaccagcagcaatgtggaagcagccaaaaggttggccaaacgcctttatcagctggacagattcaaaagatcagatgttgcaaaacaccttggcaagaagtacgttctgacccattgctggagtctgaattctctcctgttttgtgtgtgttttaaatagtttacctttcaataaccaagtctattctgttttcttatagcaacgaatttagcaaactagttgcagaagaatatctgaagttttttgattttacaggaatgacgctggatcagtcactcaggtatgactaagcctccttgctgctcgtcattgctttcaaatgattagttcttagagaagaaagtaatgtcttctagctagaatcttattttttttttttaaacctccatgtataggtggagtattccttctccaaaatgtttgggtccataagtgttgtggattttggattttgtcaggtttagagatgtttgtgttatacttatccaagtgaacatcccaaatctgaaaatctgaaatgctttagggagcatttcctttgaaccttatttcagcactgaaaagtgttgtagattttggagcatctctgatttgaagcattttagatttcttatttttgggtttgggacgtttaacctgtagtttgtgaacttagctcaaattgtattatagatattaaacacagcaaagagtaagaaaaacgtattcatttaacgaaatgacacatgaattgatagtctacacctactggtaagcctgagttcaggtggtaaacaattggtagcaaagcaaatctggataaaaaatgccatctgtaggagtttttctgtttttcgtttttttatcgtgttagaatacagatagcataaaatctttcatcttagcaatttttaggtatacaatgagtggcattaaaaacattcataatgttgtccagccgtcaccaccgtccatctccatgattctcttcttgtaaaactgaagctccatactcgttaaacaatgactttttttttccttcccctcctttcccccagcccctggcaaacactattctacttctcttctcgatgattttgactactgtaatgtaaattgatatatacattatttgcctttttgtgattcatttaacttagcataatgtcttcaaggttcattcttgtagcatatatcagaatgtcttcccgttctaaggctgagtaataccccattatggggaatatatataccaccgtcagcttcaggacacgcttgggttgcttccatgcttttgctattgtgattaatgctgctgtgaacatgagtggacaaatatttcttcaagaccctgttttcaattgttttgagtagggagtttggtttttgaatgatgagtttaacacacacacacacacacacacacacacacagtttatagattgtagaattagaattagatttttttcctaagtatttgcttattatatttgcttactatagcccaatagccttttttttttttttttttttttggagacagagtctcgctctgtcacccaggctggagtgcagtagcaccatcttggctcactgcaacctccacctcccaggttcaagcagttctcctgaatcagcctcccgaataactgggactacaggtacgcaccaccacacctggctaattatttgtatttttagtagagatgaggttttgccatattggccaggctggtcacgaactcctgacctcaggcagtccacccgcctcagcctctcaaagtgctaggattacaggcgtgagccaccgcacctagccccaatagccttttaaggtgatactttggaattaactcttcagtggaataaaaatgaatgtcagcataatcagtagaaagtatctataaaactgtttgcaacaatatccactttttctgaccttttcaaatgaaggtgtctaaaactcactgattctcactttttacattatattgtattacaagtttctaagtagctgaaggtaaaacctagtcagcatttaattttcaacactatttataaaatgtccatgtctggaagaattctgagatcatctagtgtaaccctttaattttacaaatcaagaaactgaggtctgggaggtgaagggaggatgtttggactggagtgtagtactgcagtgatttatcgtggggctcttttcatgcagcaaaggtactcagattttctaacaaaaacagttatcagtggatgaaagatctgtatttttgccttgcattctgatgtagtttattaaagttatgaaaaattaaagttttgtcaatatatagtttgttaatcttaattatacctataataaggaagaaggcaaaattttcatagaaatgaggctcatggtatgttttttaccatagtaagatttcttagacattttgaatgattttttttttccttcccatctcatgtttaggaaaatgaatctacattgtcaagtgagggtcatctggattcatctcaaataaacagtgctcttagtgactccgagtagattaatgtgtggtttttgatacacttcctataatttaaagatatttttatacataaactaattccattatgtaaggaataaattacttatatctcccaatttcctcctcctataacaaattaatattaaaatgtgataacagacacaattaacagaaatctcctgtgcacaaagcaatgcaatccatagtggctttaatagagatgacagtcatgtaacaaaatgacagaagcaccctgatgcgtgtagagttttaaaacatagcctttatgatgatgtattgagtcttaagcggtctttgttttttttaaatctgaccttttaaaattggctacttgacacttggtcataatgaggaaattacctaccttcccaaggctttcttgatgtactgaccactctgttatcaccctgtcatcttttaagtggacattttttttttcttttgaaacggagtctcactctgtcgcctaggctggagtgtagtggcgcgacctcagcttactgcaacctccgcctcctgggttcaagcgattcctgcctcagcttcctgagtagctgggattacaggcgcccaccaccatgcccggctaatttttgtatttttagtagagatggggtttcgccatgttggccaggctggttttgaacccctgacctcaagtgaacacctgccttggcctcccacagtgctttttatagaatttaaatactaataccaatttatattgaatggctgtctagtaaatgatttttttggggggagataacttcataatatcttactttgtataattaatatcttaggtttatataaattgacttttaactatgaaagagtgtgatagcattttcgaaaatttcactgtttaaatttttaattctcttgtaggtatttctttaaagcattctctcttgtgggagaaactcaagaacgagagagagttttaatacacttctccaatagatatttttattgtaacccagataccattgcttcacaaggtaatctgatacaaatccttgaatttcttttttatatcaatggttattttccttattatgaaagttaaattttattgtgagaaattatgtatcttcagttacctagtgataactattaacacttctgtttacttcattctagtctatttaatatttaatgtcaaattggaattagagttttgtttttagctgcctttttatttcattgtgagcattttctcatgtcattaaatattctttaaaagcataatatttaaggacagcatgatatcctctactcttacttaaattattttgttttccacttctctagtgtgacagcgtactttctttaaattgttcatggtttgtcactctgagattttatgtaatgaatgaaatttcagttttcttatttcttatacatttggtctctatgtttcttgatgaaagctcatgtatcctgagtgttggagttagttttggaaaaattaacaaatctcactggtggttgcgctgtgtctctggtgctttcgtttgatattaattgtactatactgaccacaaacttttgttgatgattttaataaactatgaggttatgcatattacactatttttacaaagtaagtgacttaatggtaaactgtttgtttgtggacctaccttgtgaagagagatctttcctccatttcagttcctgcaataaagtacacttttcagtgtttgaagtgaagcactttgacttgtgactggaaaatgtttcataaacttacagatgatggagtaaatcactgagactagattcccaagaaatagtaattacctcttagcttcagtattgccagttaacctggatagtttacttggtattggccaaggtgcttgcctcaacctcccctccatgtccaaggctgcagtcacagttagtttatcacctgattaaggtcacattcctatcggtaaactgatgctattcagaccagttattcactatctctgtcaccattagccctgacaagagaatgaaggagataaaagtgggccatttttattagaaccttcttcaaatctaagaatatgtttacattcttggataaaataagaaatatggattcgtgacttaattggctgttgatgaggatatttgagagttggctgctgagttcttaaaatactttcgagaatttgttttaaatatatgtagaacttgtgataataaagtggtactagaataaatatacttttagccatttggtagtgtctatttagagacactgataacagaaatcacctactatactaaagaacttacttttgaaaataccctggctttaatttatgagtgcaataattagaccttctaatttagcgtaaattgaaaagatttttactgcatctgaaactgctattgtctactgtacttgtgtagagaattagcagagtgagagtaacgagaacaactaattgtagtgtttggaaaggagaatcttaactctacttggagaacatttttatatgactttaacctaacagtaatgtgtctttggaggctcatatttacttgtctcccattgtaagcaatgcttgtctggatatccttgtactatgtatagatcactaattattgctgtagtgcaaagccctagaagccgatttgttgtatcaaaagacattgtttgaaggctttacatatctactaccaaactgtcctccagagaggtaagaacaacttatcaacagtggagtccagttctgtgcattgaggttctttctataaattattcttatccattttttgtttcttaaaacaggactaattgtacctagcacagtactgttttcataggttctgagtgtatcctattagtgataataaggtggagtccaacagtgaaaagcgaattcatgcttttttttcttgtatctttctttagatggagtccattgccttacctgtgcaataatgcttcttaataccgatctacatggccacgtaagtgtggatttgtgaaacttagatccaaaacatgtcgggcttatctctgcttttatgttcaaacacatttattttctgcctccccgtttcccattctctacatggttcccatggcaggtgaataaaaagaaatctttgaaaaaagaaataatttttttatttcacatgctagcacagagtatgactttaaatccatcgtcctggtgtctggagttgttttagcagtaatgtgtgtgttctgtgtcttctttgtccagtagatggcagacagagcttttacttatttttgttttctggttgagaattacagttgatagataatgatggagagaatacaaattagatctgaaaatgtgaattgtgttttccctacataccatagtgagttgaataactcagcctttcttgtgcccctcagcttatctagtcttttactagttgaaataataaaacaaactaattaccgtctcatcatctacttaagatacaagataaagtgttaaaatgtataattatatataaatttgcaagttttgtagaagtagaattttagcatttactcgaactcttcataatactctttaaaataaatgaacctgggactatgaagtaatttttgctctaagtaagtatagattagtccatatttaacgaattctgattgtattttgaagagaaaatcaggtgtctgtgtagagtatattatcccttgatttgccgtaatatatcttacaatttaaaaattacatataaaaaattgatatttagatattctgctagtcacataatttccttttttggaaaatatagtgttcccttttaagaaaggaaccatggagctctatgggaccattaagttggactagctgttataagaggaaggggttcagggagaaagggttccaccaccagaaagcaaacaggagatatagtgatagaatcctaattttaacatcattttaacatatctcaaaatactcagctagaaagttccttttgccatatataagaggtgaatttagaatcacttagtggcttgtaaacataggtagcacgtgtccagagataatacagatgaaaagaaaatactttcaggaagcattcttgggcagtatagcacggctaatacaccatgtggaaatgcaggcatttcacagtgtgaatcttgacatgactaccgcaatctaatgttcatccagcttgttaaagggatggccagtcagtggattgtcatgaccacttttttcgtgttactggccaagcaagttttcactgctttgtctggctgtttggtgataacagttgctctttgcacccttcttttccttagcctttctggccaaaggagaaaattttgagtgcgtttggccacatataacattgaatcaagtcagtgatcaccagcgtgaagaattcccttcacactagatattttgaggttccatcaacataaaagagttgtacgtttagcatctgttaactgagaaaagtttaatggtgggaggaaaaaaattcagtaatattgcaatttctctttaaaggttgcagatctcttagagcttttgtcacatttttgatgatttgtttctactaaatcctagattgcatttttaaaaagctaatatagctttaataatacttttacataagcatgtatctgaatcataagaacttgaaatgtagcaaccaataaagatgttattttttattagatatctcagcatgcttgatgtctagatgagctgtggacacccaggtttcagtagctacaggtttagagctgcaaatctaggacatttgctcttctttagacttacaaggaattgtaaggagattagatgaagcatcctgcttcttcttggcaactgggatggaaaagagtttacataaattaacattttaatattaccttgagttaggccaatcatggataattaataattggcagtcgtggcaaaattactgatagaagagggagaaaattatcaataacagtgaatctctgtcatattcaggatcatgtgtttggtgataagtagttctctgttttaaaaatgtgtgcgatatacttgggattgtctatttaggttttatgtattagttttccataatgcatgctgttacaagtctgttgaatatatagtagctatcataagaactaaccatgtaaatatgtttcttctatctttctcctctggattcattttaaaaataaattattcttctaggtggtaagtttttaatccataattctggatgtagcttctcttgcatcatgattgcctgatttttttgttgttgttttagtgtctgtttgacttgtcagcatggcccctatgaaatcgaatcatgcaggagataaaatgaattatttctactgttctgctccttttcaccttctccttaatgctatactacctagaatatgaccacccattacttgatccgatgccagaataatcttcatggggaatacactaatcaaccattattctttttttccttaccgttgtgtcataatagcaatactgcagcatgatctttctaagaagtgccaagaccagcttgtcctcatatgctttcagtaggggaggggtgactcccctatgaggaggtctgactcccctcttgggagattaacttgttttggctgctcttggtgaacctttcctttactctgaggaatgaggcactgagaatgcattaatatgggccttggtttggcctgctaatttccttactaataaaataatggaatgtatactaatattttacttacatttagctaatgtgacatgttgaaatccctttctttttctaactttccccttcaacaaacatgtatatagcatgcgtgtgcctcctcctttccatactctttgccatttgggtaaggatcagaggtgaatgagacaatgttcatggaagccaaataatcctctctgatggtattggctaggctgacctcattagtcaggtttcactgaagacatggtagcaggttgctgaggtgctatgatgggaaaacactggggaggtgttttaatttcatgttggatcatgttaaacttctctaattaggctagataaaaaacaatctgaagtatatacaatatttggggggagaattcagtacctgcttttaaaaaaatgtgactgatatatcattttcctagcaagagtatctacttgtttttacttgtctgcaagtagtttattcccttaaattaaatattttataattgtagtcgtgtggtgaatttgctatataatttgttttatttttgaaatgcctctttatctacaaaatacttatgtaaattaaacttctacacatacagatacatttctcttaaactctagagtttctttctttgctatattggaactaagttttattgaatattgtttcaactatcaacaaggtaagagttgaaagtctttttcttcaaccttgtttgaaatggtatggataagatttgatatgtcagaataagtttatacttactccctttctggatggatcttcaaatgcgttctgtttcctaccactaactagcttgcttgtacttcagtcacagtttagtcaggttcctaccgtcctggcaggattatcacccagggctggtgttctaaggtggtaggagggttaagtatagaattgcatagcagtgaggagtgagatagatcagagcatagtcagctggccagttccacaactagaaagtcacaagagatacacaagtcagtggctggccaaggtcaggccatggtaagaggcagtagccagggcattgtttttaatcaagattttttgacaaaatgtaccttttaacatcaaggcttgagattttcagtagcagttttgtccagcatccctctgttctccagtattggcagaagccagcccaccatgtacaattggtataagagcctggttgtggttcttagaggtagctctctttctcgggctgggcctcctacatatactttacccttgacatactcagagcatgttgagtatcatgccctgtggtctgagtttaatgatcaggcacgaccttactaatgtttttagtgttgggttgtaagtttggaaagggttgaaaccatatctagtacaacttactggtagggagaagaatataatcaaggaagaaagtatgtttaggttttgtcacagaacagtgttaaaaaaatgtggagttcagtgtgagatagattgtaagaattcattatttcttttctaatctataaacttaattattgcattggctttctaggagcctagaatcttaaatagtggataaatatttggtttattagtagtggaaaatgactattataaaaattattttaaaaatttaatgcttcatgtaggggtgggttgcccctacacacctgtgggtgtttctcgtaaggtgggacgcgagatttggaaaagaaaaagacacagagacaaagtatagagaaagaaataaggggacccggggaaccagcgttcagcatatggaggatcccgccagcctctgagttcccttagtatttattgatcatctgtgggtgtttctcaaagagggggatgtgtcagggtcacaagacaattgtggggagagggtcagcagacaaacacgtgaacaaaggtcttggcatcatagacaatgtaaaggattaagtgctgtgcttttagatatgcatacacataaacatctcaatgctttacaaagcagtattgctgcccgcaggtcccacctccagccctaaggcggtttttccctatctcagtagatggagcatacaatcgggttttataccgagacattccattgcccagggacaggcaggagacagatgccttcctcttgtctcaactgcaagagacattccttcctcttttactaatcctcctcagcacagaccctttacgggtgtcgggctgggggacggtcaggtctttcccttcccacgaggccatatttcagactatcacatggggagaaaccttggacaatacctggctttcctaggcagaggtccctgcggccttccgcagtttttgtgtccctgggtacttgagattagggagtggtgatgactcttaaggagcatgctgccttcaagcatctgtttaacaaagcacatcctgcaccgcccttaatccattcaactctgagttgacacagcacacgtttcagagagcacagggttgggggtaaggttatagattaacagaatctcaaggcagaagaatttttcttagcacataacaaaatggagtctcctatgtctacttctttctacacagacacagtaacaatctgatctctcttgcttttccccacagcttcatattgtgctattttatattttcactgtcaaaaacatcacagacttccatgatattgatgaacctcatagagttaatatcctcaagaactctctgcatctgtaatgatcactattgtaactggcagctgttaagtacatttgcaggctatcctctcatcgtcctgcaggataatatcttccctgtggatacctcttctgtctgtgcttctctgtatctgtgatgccctctgccttgaaaggtgatgccatctgccatgaaagctatcgttggcattcagttttctctctgagctttcccctgctgtagattccatccatggtcataatttctactgtgctagcactgccttctcctttggagtcctctctcctatctccttggtgccgtgtttgtcttgtcttacctggctttttttcctaaattattatttgcaaagatcttttgatttctaactttaaggtcaggggtctatgtgcaggatgtgcaggtttgttacataggtaaacaaatgccaacgtggtttgctgcacagatcatctcgtcacccagttttgttttgttttttttttctattttgataccttacagagttatttttttattttttattttattttgttattatactttaagttctagggtacatgtgcacaacgtgcaggtttgttacatatgtatgtgtgtgccatgttggtgtgctgcacctgttaacttgtcatttacattaggtatatctcctaatgctatccctcctccctctccccaccccacgacagggggtgtgcaatgttccccaccctgtgtccaagtgttctcattgttcagttcccacctatgagtgagaacatgcggtgtttggttttctgtccttgcggtagtttgctcagaatgatagtttccagcttcatccatgtccctacaaagcatatgaactcatcatttttatggctgcatagtattccatggtgtatatgtgccacattttcttaatccagtctatcattgatggacatttggactggttccaagtcttcgctattgtgaatagtgccgcaataaacataagtgtgcatgtgtctttatagcagcatgatttataatcctttgggtatatgcccagtaatgggatggctgggtcaaatggtatttctagttccagatccttgaggaatctccacagtgtcttccacaatggttgaactagtttacagtcccaccaacagtgtaaaagtggtcctatttctccacatcctctccagcacctgttgtttcctgactttttaatgatcaccattctaactggcccatcacccaggtattaagcctggcattcattagctgttcttcctgatgttcttactcctcccaccctccaccctctgacaggccccactgtgagctgttctgccccatgtgtccatgtgttctcatcattcagctcccacttacaagtgagcacacatggtaattggttttctgttcctgccttagtttactaaggataatgacctctggctccatccctgtccctgtaaaggacatgatctcattctctttttgtggctgcatggcattccatggtgtatatgtactacattttctttatccagcccttgatgagcatttaggttgattccatgtctttcctactgtaaatagtgctgcaattaacatatgcatgcatgtatctttataacagaatgatttctgttcctttacatatatacccagtaatgggattgctaggtcaaatggtatttctggttctaggtctttgaggaattaccatactgtcttccacaatgattaaactaatttacactcccaccaacagcgtaaaagcattcctttttcttcacaacctcgccatcatctgttgttttttgactttttaataatgtagccattctgactggtgtgagatggtatctcattgtggttttgatttgcgatattgatcagtgatattaaggttgttttcatgtttcttggccgcatatatgtcttttgagaagtgtctctttgtgtcctttgcccactttttaatgtgattgtttgttttttccttatacatttaaattccttgtaggtgccgggtattagaccattgtcagatggataaattacaaaatttttctcgcattctgtaggttgtctgttgactctgatactttcttttgctctgcagaagctgttcagtttgattggatcccgtttgtcaatttttgcttttattccaattgcttttgacatcttaatcatgaaatttttgcccatgtctgtgtgcagaatggtattgcctatgttttctgttagggttttattggttttgggtttcacatttaagtcttaaatccatcttgagtcgatttttgtatatggtgtaaggaagggatccagtttcagttttctgcgtatggctacccagtttttctagcaccatgtattaaataaggaatcctttccccattgcttgtttttgtcaggtttgctgaagatcagatggttgtaggcatgcagtcttatttctgggttctctattctgttccattgatctgtgtgttcattcttgtaccagtaccatgttgtttgggttactgtagccctgtagtacagtttgaagtcagacagcacgatgcctccagcttgcctctttttgcctagcattgctttgactgtctgggtggttctttgcttccatatgaattttaaaatagtttttttctaattaaatgaagaaggtcaatggtagtttaatggggatagcattgaatctataaattgctttggatagtatggccattttcgtgatactgactcttccagtcttctgtaagcatggaatgtttttccatttgttagtgtcatctctgatttttttgagcagtggtttgtagctcttcttgaagaggtccttcatttcccttgttagctgtattcctaggtatgttattcttttgttggcagttataaacgggagttcattcatgatttggctgtcggcttgacttttggtgtgtaggaatgctagtgatttttgcacattgatctttgtatcctgagacttcgccaaggttgcttatcaccttgagaagcttttggtctatgtttttacctgacttggagcttcccagacacagtggccccaaggccgtcatccctgcagcttctcggtggtcctaagagaaggatcagggctagatctcacagttgcagagggtttctagtggggcctggcgttcattttcaccaatactctttctgtctccacaataaggatatagagaatagcctgagaacctaaccattaggtgttgaaatgtttttatagaagaatgttggccaggcgtagtggctcacgcctgtaatcccagcactttgggaggccaaggtgggcagatcacgaggtcaggagatagagaccatcctggctaacatggtgaaaccccatctctactaaaaatacaaaaaattagccaggcatggtggcgggagcctgtagtcccagctacttgggaggctgaggcaggagaatggcatgaaccttggaagcagagcttgcagtgagccgagatcactccactgcactccagcttgggcagcgagcaagactccgtctcaaaaaaaaaaaaaaaagaaaagaaaaaagaaaaatgttatgatctaaaaatgatgaattgtaaattgaaattgagaatataatttactatcatattgccaatggtctagactttaataggaatccttatctaagtatgccatagtttaatcatgcactggtcaattttgttggattctatgacctcttagaatgaaagccttctttccttttttccatcctctgttccttcacctgtcccctttccccaccctctagcctcccacttttggtagttttgcttttttaagaacaggtttatatatggaaaatacctcagggtagctttaatcagttgtgtcagtggggcttattgagggacctcatattatctaacttacacattattcagtcttcttatcactgtaagctttttacattggcacagttctgttatagaacgtgatcaaggaaagcaggtcaaattctaagtcagtttcgctctttcttactttctgcaaattgattgtggaggaaggagggaggaatgaggatgatggtggctgaaacccctgactcttgtttccaatcctgttgcttactttaatgccagtcctgctacagcaatcaagttaaaaattgtttggttagtccttgtaatttgacagtgagttaggtgtgtttatcttttcaaattttaggggaagtgctttccatgaaatatcaatagaagtctgatatttcagtattctaaaactttttggtcccaggatagctttatactcttaaaatttttgagaagccccaaaatcttttgtttacatattaatatttatctggaactgaaactgataagatttttaaattgcattaaatcattaaaaacccattaagtgaataacacatttatgaataatagtcatactttcctaagtgagaaatatattaaagaatagcacttaaaattgttgctagtctttttatatttggcttagtaaaagatggctagattctcatatctgtttgtgtttatagtcggttgcagtgtatcagaagtcatgcatcttctagaaaactctactgtatatttgagagaatgaaaaaaatgtttttagtgttactataaaaatagggttgacctcatggacatctggaacagtatctctgaaacgctttgagaaccactgtgctgtggtactatttttagttcctttttttctttttaccactctgattcctttttcaaaggcaggatattataggacaggtgggagaagtcccagtgacatatcagatattcctaaatgttgagcttttagcacttaaatgagctctgtgattagggtttgtgagagagcacattgaatatccactgtagtcctggttttaaaatttacaaagggtcctcctttgccccccagtcatacatttaaaaaggaatggacacctgagggcagcatgacataatcaaacttatttgatagcaaagcatgcaaaataaaagcaaaacaggagctttcagcagagccacataactgaagtaattaccaaatcagtagtatgcctttccaccatttattgtaacatgttggaggaggtggaattgtcatatgggagagtatgcctgctgtgtttttaatatcctgagatttatgaagccagattttaccaatggatgatgagggcttttagtttctccaaaagcacgttttccgcaaagcttccagacctgacactatcaaaaatgaagaattttagaatcattatgcttaattcttcaacctctgaatcagagtatatgctgttgtcagctttcctagtgaatacctgattgacacagctgccctattcgcagctctcctagggctgattttaagttaggcgatggtcagagctttgtaggttacattccccagattgccagggatggcacgctcaaagatttggtcacccgcttgctgagtttggtgccgaagcttgtatacggtttctggctgctcctgatatgaatgaaattctccatcttcattttcccctttgctctcgttattgcaacagaagttgggagctgcttctctgttatggtcaggggaaagtgccctttattttaacaaagcgaaaacctgcatttggagaatagaatacatcaggatgcctaacctgtttgcttgctcgctcacgatgttgtcctcagtaccaataccacttccttctggttttctttaagacaaggggtagacaagttatgactcataggcaaaatccatctggggcttgtttctgtaaatcagtgttatcgtaaatagccaaacccagttgtttacatcttcacaccaattatagtgttgaataactgtaacagaatatatgacttgcaaagcctaaaatatttactctctggtcctttacagaaatttacagaatttgtctgttttggagtcttgcccttagttcacgaaacctgctagagcttggacacttgtttccccaaattctttactaaaaattgtttatgggaatgtattaaacatattgaggataagttcttccagaaatgataaatttatcaaggaactttgctctaaagggcatttaatgtatctttaaacgaacacaaacagagaaaacatctttttatcataagaaagcatttgaaaatggtaatattgtcgctgcagagagtagccttaaattgttgcgggatgacgtaggcctccgatatagagagtattttgacttttgattaatatttgctcccataaaggatgataccttgattagccaaatatttaagaattgggcctgcctggaattttggggttccaaatagaatttttttttaaactttccactttgtcatctattttgttatttgatattttttaagtttgattaaaatgcctactgattttaaaggtaatgatccagagcttcatctttagttgcatctgttttgatagaaaatatattgatttcaaggtaccatttctgtacctctcaatgcatcaggaggcattttcaaatctccatgctttattgatttaatgggaagaaatttaaaatatgaaaaagtattattaaagtactttattggcatgcaactggtcaacatttgtttcagagcagaactacttttatgcaaagttatccaaaactaatttgggaagaaaatgaatggaactgtgatagtgtatgagcttctcttggatacttatgaagccttgagccacaaaatcactgattagaatttgctttattcgttgagtagtgtttgcctgaataatagtattttaaaataattgagacagcctggtacatgacaaggagaaaaaaatccagacatcgtgaggagtatttcttgatgacaaagacttcattttacttttattccctttggaaatggtataaacgcctgagtggaaggaatgtgtttaaatatgtgccagtaagcagcaaaatggactgatctgactcctcaccttttgttcctaataattcttgcctagaagaatgatcagtgagtcagaggagtacaatcaacagataaaagcaacttcagctagtcaagcattcgagaagttgttggacatttttaacacatagaaaaccacattatctttattctctgaaccagtaaagaaaattaaggtacagtctattggatgattgtactaatacttgcttactgcgtaggactccaagtatttgaattggcttttgttggtctgaatctatatatccatcttgcccacctaactgctatttttcctaatggctgtttcaaagtccacgtgagtcaaattggtatctttgtgctgacatagataatggtatggtcactgttgaaattggacagaaggcactgccaaataagcagttaaagtaaatctgaatttaggatgaggtatgatttcatagaccaaaatagcttcatagactttactgttttaaaatgttatgaattatgacaattattacttaaatgatgtttttaataattccttaaagtagaaattaatggtgtcctgaaaaaacacttttgactctgtagcctttaaatatcttgttcatgaatctcccaaaagaattttttttaaatagtatctcttcttcaagtttaaattggaaaactttttgtttgaaacggagtctcgctgtgtcacccaggctggagtgcagtggcgcaatctcgactcactgcaagctccacctcccgggttcacgtcattctcctgcctcagcctcccgagcagctgggaccacagggaaactttttattgtaagtttaagtataggcgtatctcattttattgtcctttgctttattacactttgcagtcactgaacatttttcctaacaaagtgaaggttgatggaaccctgcgtcaagcgagtcttatcagtgccatttttcaatgaaccattcccatataagacagcagacttaattgataaatatatatgttttgactgcgccaaaggctggccattcccccatctctgtctcctcaggcctccctattccctgagacacaacagtattgaaattaggccaattaatagccttagaatggcctctaagtgttcaagtgaaaggaagagtttcatacgtctcgctttgaatcaaaacctagaaatgattaagtttagtgaggctgagataggccagaagctaggcctcttgcaccagacagttaataaagttgtaatgtaaaggaaaagttcttgaaggaaattaaaagtgccattccggtgatcacaagaataagaaagcaaaacagccttattactgatacagagcaagttttggtggtgtagatagggtatccaaccagccacagtattcccttacaccaaaacctaatccagagcaaggccctgagtctcttcaattctatgaaggtcgagagaggtgaggaagctgcagaagaaaagttggaagctaggagaacttggttcatgaagttttaggaaagaaagtgtcttcataacctaaaatgcttggtggagcagcaagtgctaatgtagaatctgaggcaagctatccagaaggtctaggtaagatattttttcctagaaacaaggaagaacattttataataagggtcatttcatcaaggtgataaaacacttccaatcaatataagccccagtgatactatgacaaataagaaatacagatttggtctctgctcctggttcttgaaatggacctcctgagtgacagcagttctgacacagggttcctagatgccttggatgaatgataggagcattgtttattctaatgaggcaagccttggtgagctcctagataagctcagcaaggggacaggttgttaggggaaataaccatgtgattagagggttggaattttcagcctcccctccttccgcacacaccccacctccagggagcaagaatagggtgaaggtttagttaataccactgaccattgatttaatcagccatgtctgtgttataaagcctctgtaaaaacccaaagtatggggtttggagagctttgaggttggcaagtacatctatgtgcttggaaggtgggcatcccaacatcacagggacagaagccccaacacttaggaccttttcagacctcactctgtgtatctctttatctcactgtttatctatatcctttgcaatatctttgatattaaagggataaatgtttccctgagttctgtgagccctcctagtaaattaaacccagatagatgatcctgcaaacccccatttatagctgattggtcagaagtataactgacaacccactgctaccaattgacacccgaaacttggggtgatcttgtagggctgagcccttaacctgtatgagctcatgaaatcagcagatacatagtattataattgaattataaaacacccaactggtgtctcctggagaattggttgtgaatgtggagaaacccccacatacttcagtgactattgtgttgagtggtgtatgagtgtagggaaaaagtcttattccttctgaacacataataagccgtgaaagaacaatggacagaattggagggagaaattgttttattgagaaattagcaccgtatattaaataatgcttagaatcaccacgcacgatatcaacaaggaaatagacttgaacaacataaaaaccaactagatctaacagatacctgatgacaggagagtaatctttaaagtgtacatgaaaaatgctcaaggataggacaaaattcgcaaaaagggattgaaaacatacaaaacatgtttctggacataatagaatgatattagaaatcaattaaaggacatttatgtagtcatacaatatactcctaaataaccaataggtccaaaaaaaatttacaagaggaactaaaagatagtgatgaaaataaaaatatgttggccggttgcagtggctcatgccagcagtctgggaggccgaggcaggcaaatcactttgaggtcaggagttcgagaccagcctggccaacatggtgaaatgccatctctacttcagaatacaaaaaatttgccaggcatggtggcatgcacctatcatcccagttactcgagtggctgatgtgagagaatcacttgacccaggagacggaggttgcagtgagctgagattgtgccactgcactccagcctgggcaacagagcaagactacgtctcaacaacaacaaaaaaagcaaaatgaaaatacaacataaaaaacttatggtatacagctgatgaattgccaaattgcaaattattgctctaaattgctgtattttagaaaaatgtcaaatttacagtctaacctaatgaaagaaacaaaagcaaactcagtccaaagaagggaaagaataatcagagcaaagatgaattaaacagagaatagaagagtaatagagaaaaagcaatgaaatcagaagcttgttttttgaaaagatcaacaactgacaaaagttgaattagactgaccatgagtaaaagaactctcaaattactaaaatcagtaatgaagagggcattactattggccttatggaagtaactactgtaagtgaatattgtcaacagctagataacctagatgaaatgaacaaattcttagaaagataaaaactactgaaactcaaaaggaaacaaaacctgaatagatccttagcaagtgaagagtttagtaatcagaaaacttcctacaaagaaaagcctaagatcaaatggctttacttgtgaattgcatcgacatttaaagaagttttaacatcagtttttttacacccttcagaaaaaaagagtaacactttttaagtaattctatgagagcactattaccctgataccaaaatgagacaagtcatgataaagatatcccttatgaatatttcttgcattctaaaacaaacctaattcaacaaaatataaaaaggattatatagcatgaccaagtgagactgccactgccctgcctacggccatgtgccacccagctgcgtgccacttggatgctcggtgatggccactaggccctttgtacccctaactgctggcacccaaagctgtagcttggggccccaagttagccctctgctgctgttgcagccgcagacattatgcataccatctaagggcctgaggacccattcactcagcccattgttgccactgctagcacacagacaatccacttgaagaccaaggattcgtcctcctgacctgcttttaccaatatccacgtgtgttgaccgagatcctgcatatccatcccagagttgccatcactgttgcctaagaactggcctgcctgatgtccctttcactagcaaagcctcactacagccgttactaaaagccacagctttatccactgaggaactcatagacaccactgatgctaaagatagtcaaagaagtcatatggagactgcactgcttctcccacccagaatcaaagccaaaacgccttacccaaacaactctatagatagctctatagaaaaaaatgtctttcccttcgaaacccaatccatagagttggatgaagcaaatgttacaccagatgcatagatataaatgtaaggacacaagaaacatgagaaatcaaggaagcatgaaaccatcaaaggaacacaataattctccagcaacagatgccaatattaaaaaaaatctatgaaatacctgaaaatgaattcaaaatatttctgaaaacccaggtactacagaaaacagatgaacaatgcaaagaaacatttcaccatctgtatgagaaattcaacaaagatgtcagaaagaagttaaatagaaatcctgaaactgaagaattcaaagagtaaaataaaaaatataatcatcagtttcaataacagactctagatcaagcagaagaatttgtaaacttgaagacaggtcttttgaaataacctgagcagataacatttttaaaaaaaataaaaacgaagaaagcttatgtaacacatacaatgacgaaatagtggaattttcagttttcctggaagagaacagatgggtaatggcatagaaaacccatttaacgaaataataggtaaaaacttctcaagtcttggaagagatacagacatctagatataggaagctcgaagatcttcaaatatattctaccctgaaaggccttctccatgccacttcatagtcgaactgttaaaagtccaagaaaaagagaattctaaatacagcaaaggggtcaagtcacagagaagagtatccctatcacactaatagcaaatttcttagcagaaaccttccaggccatgttccacggtggaaaagtctatacaaccctacccccaaagttcaaggaatatgagaggccaaagaaagaggctgacaaattcagtttcttagaaacatttaatagggacttaggaacatttaatagggattgtgtcttgggaggtacttcaagagacaaagatggtggatccctgtgcctttactcccaagacctagggcttatatgccatagaaaaaggatatgcatgcatcagaagggctgtgtaggataactgcttaagggcattgattatagcaagtacaataacatttacattgttttgacctaggaatgggatttatggtaagtacatgctcttaagtaaaaataaactggaaatcttagaggccttcttggaactggggttaataagaaatcaacgtggtggatggaattactttggccactgcagtccaggagtaaatgaaatgataactccaaagtggtgaaaagcagaacaaacaaaaaaacacaactgtcagccaaaaatattatacctggggaagatataaaaaatgaaggagaataaatgctttccaaagcaaggaaaaattgaagttaatcaccactctactggccctacaagaagaggtcaagggagccctgcatttagaagataaaggacaatatctgtcataatcaaaacacataaaagtataaaactctgggccaggcgcggtggctcacgcctgtaataccagcactttgggaggccaaggcaggcggatcatgaggtcaggagattgagaccatcctggctaacacagtgaaaccccgtctctactaaaaatacaaaaaaattagccaggcttggtggcaggcacctgtagtcccagctactcaggaggctgaggtaggagaatggcgtgaacccaagacgcagagcttacagtgagccaaggtcgcaccactgcacactccagcctgggcaacagagtgagtgtcggtctcacaaaaaaataaataaataaatagaggaggcaagtgttactactacagaaaaccagcaaaccacaatgataagaggagaacaggatgagaggatacacaaaaccaaaaaataattcacaaaatgacaggaattaagtactgaataataaccttgaatgtaaacagtttaaattccccccttaaaaaatatagattggctgaatagaaaaacaaaaaaaaaatgacttaactatatactgcctataaaaaactgactttactggtaaagacacgtagactcaaagtgaagggatggaaaaagataatccatgcaaacagaaaccaaaagcaagcatgagtagctacactagtatcagataaaatagactttaagccaaaaagcggcaaagaaggtaattctataatggtagagggaccatttcagcaagaagattaaacaattctaaatatttgtgcgcccaacactggagcatgcagatatagaaagcaaacattattgaatctaaagggagagactgagtccaataaaatcagattaggtgtcttcaacaactgactctcagccttggactgatcatctagccaagtcatcaacaaagaggtattggatttaaacttcgttttagatcaaatgcgcttgatagacatttacagaacatattgtccaacagctacagaacaagtattcttatcacatgggacattcttgaggctagactatttgttatacaacaaaagtagtctcaacgattaaaaaaatagaaataatatcacgtatcttctcagaccacgatggaataaaactagaaatcaacaatgagaactttggaaattgtacaaatacaaggaaattaagccacaattatgagccatcactggatttaaggagaaataagaaacaaaaagtttcttgaaacaaatcaaaatgggaacacaacatatcaaaatatgtgggatacagcaaaagccatgataaaaggatgtttaatagcaacaaatacttacatgaagaaagtagaaagattttaaagaacctattgatgcacctcaaggaactagaaaagcaagaacaaaccagatacaaaattaacagcaggaaataataaagtcagagcagaactaaattagaggtgaaaaaaaggctatacagaggatcagtgaaatgaagagttgggttttttttttgagagaataaacaacattcataaattgctggatagactaaccaagattaaaaaagaagacacaaataaaatcccaaccaaaaaaggagacagtaaaacttatatcccacaaaaatagaagattgttagagactatcgtgaacaactgtctgaacaaattggaacctacgggaaacagattcattcctggacatgaggaaactaccaatatttggccatgaagaaatagaacacctgaacagatcaataatgagtaatgaaactgattcagtaataaaatgtcttctaacagagaaaagcttgagcccaggagatttttactgctgaatgctacaaacttacaaagaagatctaacatcagttctcctcaaactattccgaaaaattggagaggagggattttttcctagcttgttccatgaggccagaattaccttgatgccagaaccagataaggatacaataagaaaacactataggccagtattcctgacgaacttagatgcaaaattcctcagcaaaataccagcacaccaaatctaacaaatcaataaaaagatcattcacgatgatcaagtgggttttattccagggatggtaggatggtttattatatgtaaatcaataaacatgatacgtcacaaaaaggtcaaaaattatatttttaatataattatatatttttgcatctcaaatgcaaaaaaagggtttcataaaattcaacatcccttcataataaaaaaactcaataaattagacatagaaagaacacatcatagtaaacgccatgtatgacaaagctgcagctaactacatactgaggcagaactgaaatcctttcttctaagaactaaaacaagataaggatgctcaccttcaccactcatattcaatatagtactggaagtcctagccagagtaaccaggcaaaagaaatgcatccacgtttgaaaaggggaattcaaattgtcctttcttcagataacatgatcttatatatagaagaacctaaagactctacctgaaactcttagatctgatagatgaactcagtaaagtttcaaggtaaaaaatcagtgtacacaactcagcagtgtgtctattctctaataatgaactagttgaaaaagaaatcaggaaagtaatcccatttataacagctacaaaagaaaaaacctgggaataaatttaacccaggagtaatttcattcgatccagcaaccccactactatgtttttatccaaatggaaggaaattaatgtcagagttatagggcatccctgtacttactacagtactattcttgatagccaagatatggaattaatctgtgtccatcaacttatgaatacacaaagaaaatgtaacatatatacataatagaatattactcttccattaaaatgaaatcttggcatttacggtaacgtggataaaattacatttcattatattgagtgaagtaagtcaggcattgaaagacacatattgtatgctctccctcatgagggagtttaaaaagttgatatcatggacatagagagtaaaatgatatttaccagaggctgtggatagtggtggtggtgggattaaagggaggcgaatggaaacatatagttagaaggaataagtcctattctttcatagcaccggaggatgaatatagtttataattgttgaatatttcaaaatagctggaagatttgaaatgatcccaacacagagatgtagtaaatgtttgaagtgatgggtatccaaaatatcctgatttgattattacacattacatgcatatttcaaaatatcacatgtaccccataaatatgtatagttattatgtgttaatgttttcttaaacttagatttcagataaacaatctaatgaaacactgtaaagaactagaaaagcatgggaaaaaaactcaacattagtggaaggaaacaataaaggtcagagcataaaaagtgaagttcagattttaagaaacaatttaaaaggtcaacagaaatgaaaagttgggttttttaaaacattggcaaaattggcaaggcacagtggctcacacttgtaatcccagcactttgggaggccgaggtgggtggatcaggaggtcaggagatcgagaccatcctggccaacatggtgaaaccctgtctctactaaaaatagaaaaattagctgggcgtggtggtgcatgcctgtagtcccagctacacgggaggctgaggcacaagaattgcttgaacccaggaggcagaggtttcagtgagccaagatcgttccactgcactccagtctgggcaatagaggtagactccgtctcaaaaaaacaaaaggcaaaattgacaaactttttgctagtctaagaaaaaagaccaaaatcaataaaatcagaaacaaaaaaagagacataactactgataccgcagaaatacaaagaaacacaaaatcattagagactcttatgaagaagtattccccaactacttggaaaaacgagaagtggaggtatttttagaaacatacaaactaccaagaagattcaagaaccacgaagttcatcgggaactttgaagaaagaaaaaacttgaacagaccagtaatgagtaacgagatcaaagcactaataaaatggtctcccatcaaagggaagctcatgatctgacagtttcactgctcagttctgtcagacatttaaagaagaaccaggccagatgcggtgactcacacctgcaatcctagcacttgaggaggccaaagctagcagatcacgaggtcagaagttcgagaccagcctggccaatatggtgaaaccctgtctctactaaaaatagaaaaagtagccaggtgtggtggcctgtagtcccagcaactcgggaagctgaggcagacgaatcacttgaacctaggaggtataggttgcagtcagccgaggttgtgccactgcactccagcctgggcaagagatcgagactccgtctcaaaaacaaaaaaaaaaaattatatatatacatatatttagatatatatatttttatactatatatatttatatagtttatatatattttatactatatatatttatacattatatatatatttatacattatatatatatagagagagagagagagccatggtaaccaatatagtatggtactggcatggaaatagacacattggtcagtggaacagaatagagaaacctagaaatccatgcatttatagccaacttagttttgacaaaggctccaagaacatactttgaggaatggggagtttcttcaataaatggtgctcagaaaactggatatgcttatgaagaagaatcaaactagactcttaactttcacaatttacaaaaatcacctcaacttggattaaagagttaaatgtaagaactaaaaatatgaaactactagaagaaaagattggggaaacactacaatggtgggatgagtaaagattttgcagggggtcggcgggggaggggaagacctctaaattatgagcaacaaatgctaaaatatttagatgtggtgtcccatcaagctaaaacccttctgcccagtaaaggaaataatcaacaaagtgaagatacaagctacagaatggtagaagatatttttgagctatccatttgaaaagggattaataaccagaatatataagtaactcaacagcaaatggtcaaataactcgattttaaaatgggcaaaatttttgattgaataggtatttctcaaaagaagacatagaaatggccaacagatacatgaatagatgttcagtgttacagggaaatgcaaatcaaaaccacaggagatatcattttacccgagttaaaatggtttttatcaaaaagacaataaacaatgagtgctggccagaatgaaaagaaagggaaactcatacactctctgaaaaagacagtatgaaaaagagtgtgaatgctcattgaaaaactatagaactaccatatgactctccattcccactgcttggtatatatttaaaagaaacgaagtcagtatattcaagaaatgtctgcactcccatgtttattgtagtactattcacgttagccaagatatggaattcacctaaatgttaatttatagatgaatggatatagaaaatgtggtacataaatataagtggaatattactcggccatagaaaatgatgaaattatgttattggtagcaatgtggatggaacacagaggtcattatgttaagtgaagtaaactggcacagagcgacaaataccacatgttctttctcaaacttgggggggcttaaaaagtagatttcatgaaggtagagagtagattggtggttaccagaaggtaggaggaggaggggcacaggggatttagaaagggttttgaaaggttgattaatgggcacttttctctttccctcggggcatttggcagcggtggtggcttttgcagccgtagccaagattaaggctcaggatctttgaggcaagaaggaagaggagctgctaagacagctggacaacctgaaggtagacctgtcccagatgtatgtcgccgaagtgacaggtgcccgacattccagttctcttagattgtagtcatttccaaatctgttgcctgtgttctcaccgtcattagccaaactcagaaaacaaacctcaggaagttctacaagggcaagaaatactagcccccagatctgtggcccaagaatacttgtatcatgtgccactggctgaacaagcatagggagaacctgaagaccaagaagcagcagcagcaggaacaggctgtaccaacgacagaagtaagaggtctaggcatgaacattgctgagtcaaaattcaaactggaggaaaaaaaaaggtgttaggttaatgggcacaaaaatacagttagaaggaacacgatgtattgttcagtactgcagtagagtgactatagttaacaataatttgtatatcttaaaataactggtggagagcaattgaaatgttcccaacacaaagaaggggtgaatttttggggagatggatgtctcttttgccctgttctgatcattatacgatatatacatatatcaagatatcacatgtactctaaaaatatatgtagctattatgtttcagtttttaaaaactctgtttatatgtagcataataaaatattttgtgtctttaaaacaaaattaaaggaataactaaaggaatctgtatgggagaactgatcttgtgtgtagaggatcttcaggactatacaaaagaaaaaacctattaggactaaagacgttcagcaaggctgcaaaatacaagttgagcatttgcaaaacaattgcattgctatatactagcaatgaacattaaaagtgaaataattttacagtagcatcaaaaaatcaagatattagagaataaatttaacaaaataagttcaagtgaaactacaaaatactgaagaaaggaactgtaaaagtggaaagatcttttatagtcatgtattggaactttattgttaagactgaagtactctccaaactgatcttcagattccacagaatcactgtgaaaatccaagttcactttgtatatgtatgtaaagaaatggacagacaaatcctgaaatttatgtggaaatggaaagggcccagaatagtcaaaatatagaaaaagaggcaaaaaattggaggactcctgatttctccatttcaaaacttatcaaaccatgctgcagaataataagatgcaaataaaagggaaaatatttcatgttcatggactggaagacttaatttttttatatattatactatacaaagtaatctacagattcaacacgattactatcaaaatctcaataacatttatcccagagatggaaaatgttctaaaaatcatatgagagttcaaggtaccccaaataatcataacagttttgaaaaagaacagagttagagtactcgtatgttattttaaacatattacaaagctacagtagtcaaaatagtgtggaactggcataaggacaggctaatggaatagaatagagtgcacaaatcctcaaatcttcaacaagagtgctaagaccactcattggggaaatgtcagactttttaaaaaatggtagtgtgaatacagtatcttcatgcaaaaaaaagagaagtaggacccttatatcacacagtgtataaaaattatctcaatgttttaaagacctaaatgtaatcctgaaactataaaatcctgagaaaaaacataggggaaaaacatcacgttattgtatgtgccggcaatttcttcactgtgacaccaaaagcacaggcaacaaaaacaaaaatgggactacatcaaactgaaacgtttgtgccttaaaaacaaaggggtgtgtaaaggcaacctacagaatagaataaaatatttacaaatcatatacctataaggagttaatatcggactgtgtaaagaactcctatatttccacatctaaaaatcaaatatcctgattttaaaaggggaaaaatactttaatagatatttatccaaagatggtctagaaatgttcacaagggccgggcgcagtggctcatgcctgtaatcccagcactttggaaggccaaggtgggcagatcacctgaggtcaagggttcgagaccagcctgtgcaacatggtaaaaccccatctctactaaaaatacaaaaaattagccgggcatgatggtgggcacctgtaatcccagctacttgggaggccgagtcaggagaaacacttgaacttgggaggcggaggtcacagtgaccagagattgtgccactgcactccagcctgggccacgagagcaaaactccatttcaaaaaaagaataaaagaagtgttcacaagcatatgaaaacatactcaacattctctaatctagaaatgcaaataaaaactacagttgggtatcacctgatacccactacgatcattgctatcaaaaaaaatagaaactatttttggcaaggatgtagacaaattggaaacgtactgttgtaggaattgtaaaatggtgcaatcactgtggaaaatagcttggagggtccacaaaaaaatgagaaatataactatcatgtgatacaccaatctcatttctgcacgtatatatataaaaagtttaaagctggattttgaagagatacttgcccacccatgttcgtagccacacttttcacattaaccaagaagtagaagcagaccaaatgttcatccacagatttatgtataaataaaatgttgtctctacataaaatggaaaatcgttcagccttaaaaaggaaagaaatcctgtcacatgctacaacatggatgaaccttgaggacattatgctaagtgaaataagccagtcacaaaaagaaaaaatatgattccatttgtttgaggtaagtaaagttgttaaattcatataaacagaaagtagaacgttggttacaagtggctggcatgaaggggaaaagaggagctctttaatgggtatagagtttgagattagtgaggtgaaaaagttttggaattctgttccacaacagtgtgaatatactaatgtgaaacagtactgaactgaatgcttaaaactgttaacatggtaaactcagtgcaaagcttcagtaatcaagagttatgctgatataaagctcaacagctagatcattgcagtataatcaagtgtctaaaaataatcccatacatttatggtctgttgatttcaaaaagagtttcaaaacaatttggtgggggaaaagtagtctttccagtaaatgatgtcgtaacaactgaatatccacatgtaaaagaatgaagttgaatctctgctttctatcgtacaaaaatgaactcaaaatgggtcaaatatctaaatataagagctaatgctacaaaattttttggagtaaatctttgtgatgttggattaggcaatgatttcttagatataaaatacacaagtaagaaaataaaacacaggtaaactggatttcacctaattaaaaccttttgtgcttcaaagtgatagggacaagaggcagggaaattctgggcagaagaggatgggtccccagtgagggctgcaccctcaagctgaaaagcctgatgcggtggcccaaagtgagaacttacatccctgatttcctgttcaaatgttgccttttccaaaaccacccatggcctgctctgccccccattcctgtgcccataaaagccccagcctcagccagcagagagaggagaagcagctggacattggagactacagctggatgtcagagagaagtggcttgacttcagagggacagtctgacagcataacttctgagaagaatctggccagagacagccaaacttcagtggcatttaccttcccactctgtccccttttcagctccccttcctgctgagagccacttccatcggcaataaaatttcctgcatttaccatcctccaatttgtttgtgcaacctcttttctcctggatgctggtaaagagctcaggtgccccaagtgtggttgcaaaaggctgtcacactgaccctttgcccttgctggcagaaggcagccatctcacccaaaaaggcagaggatccactgagctgttaacacttaagccatatgcagacagccaagctaaaagagcacccaaacacttcctctgggacttcaggggtcactggcacccctccccagatgttgctgcgggaccagtacagagttcactcctgctggtgcccgaaggcatttgcccgagctgccgtacccactcacctgtttgctccctccagcaaggggtggaacacagcagatttgagtgagtggagttggctgactccagtgctcatatactcccatatctgcccatgaaggggtcagggaaatatcctgcttcaaaaggacatcatcaagaaagtgaaaggaaaaaaatgaaaagacccacagaatgggaaaagatatttttaaagtacatatgtgataagaaaattatatctagaatgtgtaaagaagtcttacaactgaataataaaaatataaatattccaataagaagggaaaataggattttaacaggcctttctctaaagaagacatgcaaatggataattagcacatgaaaaaaagctgagggtcattagtcattagggaaatgcaaatcaaaaccatagcatacccgttcatacccataacaatacctaaagtaaaagggacagatgttagtgtctgtgaggttggagggaaactggaaccctcattcgctgcttgtgggaatgtgaaatggtgcagccactttgaaaatgagtctggcagttccttaaatgaataaacaagattaccataggactcaataatcccactcctaaatatatgcccaggaggaatgaaaacatgtttacacagaaacttatacatgaatatttatagcagcattatttataatagccaaaaaaagaaaatagtctaaacattcatcaatttataaatgaagaaacacaattggtatatccatacaatggaatgttgtttagaaataaaaggacattaaatactgatttatgcaacaacatggatgaacttggaaaacatgttaagtaaaagaagctagtcataaaaggctacattttatatgattccatttatttcacatgtcctgaataggcaaatctgtataaagaaaatgcagatttgtgcttgccaggtggtccctagtgagggtggtggaagagatttggagaataactgctggtgggtatggagtttctttagggagtaaatgttctgaatgtagatagtggtggtgattgcacacctttattaaaaatcactgaattatatggttcgaaagaatatactgtgaattgtattttaataaagatgatacttttttaaagttatagtagttgatgctatcatcatgtaacaaaattaacacacttttttaagagaaaaattttcgtttttatactcatattttagtgtacttttacaaagaagtttattaataacaatttatttaaagcagataatgttacaagcagttgaattttgcagatcacatatcaaaaaatagttttggtgattaactgatgactaaattagaccttcctttattttcatttaaagcaaagaattaaacaccacctgacttggaaaaagatttgttacctagtcattatttattcatctccccagaacatatctaaaaaggtattgccaaggtatatcataatgactgttcattgtatgtgttatttttttaccttgagacaccttgtttgacctgatacagttggaaaggattgggaaaactgagttattgtcgtcttcagtatactgttgcaaaacaatatttttcattaaagttcctttctgtgctttaaactaattatcaacaaaatttttaaactgcagatttaatttatttaacttatgagaaatatctactaaataagttagctgacaaagccacttctgtcaaaccatttttttcagtgtttcatacaaactatgcattctttgctgatgaaagaggcaaggtttttaacaacaacaacaaaaatgtcagcactgtcattgtaactatttagacagcttgaatgggacgaattgttttattttgtgaaacaggagaagggtggctgggaaaggggaggtgggaagtgatgactcctatggcacacaggtgtatgttctcaggcaaatctgtctttgaatttgaggttgtgtatacatattcccttaaaatgatgcctgtgcgtcttcttgaaagtcttcctctgttacccgagctggaatgcagtggcacaattatggctcactgtaacctcaacatcctgggctcaagcgatcttgcccctcagcctccagagtagctgggactgcaaagcacgtgccttcatacccagctaattttcatattgtttctagagagggatgttacccaggctagtcttgatctcccaggctcaagtgatcctccttcctgggcctcccaggcagtgtgggattataggcatgagccaccatgcctggcctcctttatatttatttttaattatttatttattttttgaactggactctctctctgtcgctcaggctggagtgcagtggcacaatcttggcttactgtaacctccacctcccgggttcaagtgattcttctgcctcagccccctgagtagctgggattacaggcgcccgccatgacatccggctatttttttttttttttttttttgtattttcagtagagacaggattctattatgttggccaggctggtctcaatctcctgacctcaagtgatccgcctgtctcggcctcccaaagtgctgggattataggtgtgagccaccgcgcccggcctctgctactttttaaaagtctatctccagaagtctgctttctcattttgaataccgtaggtattcaaatgaattcactttcaaatgaattcactaggtgctgttctacccttctgttagccttttacgaaagaatagcgtgaccttgaaaagcatacatttatgcatagtagtagtgtatgcaggtatatttatttatttggttggttggtttttttattttttatttatttatctgttttgagacggagtcttgctcttgtttcccaggctggagtgcagtggcacgatctctgctcactgcatcctccacctcccgggttcaagcagttattctgcctcagcctcccaagtagctggagttacaggcggccgccactgcacccggctaatttatgtatttttcagtagagacggggtttcaccatgttgagcaggctggtctagaactcctgacctcgttatctacctgcctcggcctccgaaagtgctgggattacaggcttgagccaccgtgcccggtcacaggtatattacgatgttggtacactttgtattcacttggactacattttgctagagatgatacctgtgacacttctctgtgctctgcgttcctctcctgcactcgtaacagatgtatcttgctgtctatacggaacctaaaaatcctccacagctagcagcttctactagttgtttggaactagaataagaggtgattctctgtgataacaattttgttagttttcttagtttgtttatatctttgctctttttgtagtttggattttctaattactttattaatgcaatttccttttgttaaactttattgtccttaaaccagcttggagacgtgctgggagataattttccatgggtctcacactttcctgtacgttttgcgaacagaggctgtgactgcctttgttcttttctgtcttttcaagattatttctatatacagtgagtagctttggaagatgctgtagtgacttcacagcagcggtcaggtttgcatatctccctggaaggtagagctggtatctcccgctagtgcaaagggataggcgtatttcccatgattaaagattccagctcctgaaggttagggtttctctcctataatgcaacacactgcatgtgcaggtggcctgtggccctattcaggttgctctgtgacatttgggacttggggaactagagcccagtggtcacaagataatgttgatattctggctgcccctgttagtgtaagtaataaataccttgtctctcacccaggagacttctttcctctgccagcattttattagcttgtgacaggctaacttgttagtttgaaagtagtgtaaatctcagatccttcacaggtcttgatagtatgtaggtaacacaaataaatgcataaacagctgagttcagctcagaaatgtccgtttttacccatgtttttcattaaaaactgtattatatattgtataaatgtagcgtcggtttttcaagtttttttctacattataataagtttttggtataagtttgctatttatatttaatgagaattttaaaagcataataaaccatgtttttagtgcagtaaaattgtatgtatgtgtatataaacctgtggttgctttgtttttgttttttgagatacagttgcactctgtcacccaggctggagtgtagtagtgcagtctcgactcactgcaacctctgcctcctgggttcaagtgattctcatgcctcaacctcccgagtagctaggactacaggcgcctgccaccacgcctggctaaattttgtatttttagtagagacagcattttgccatgttggccaggctggtctcaaactcttgacctcaagtaatccacgcacctcagcctcccaaagtgctgggattacagacatgagtcaggagccactgtgcccagccctgtatttgtaaatagatgtctagttatgttatttgtttgtttgtttgtctgttttttgtttttggtttttttttttgagatggagtctcgctctgtcacccacgctggagtgcagtggcaccatctccgctcgctgcaacctctgcctcccgggttcaagcgattctcctgcctcagcctcccgagtagctgagactacaggtgcatgccaccatgccaaactaattctttgtatttttagtagagacggggtttttactaaacatgttagtagtggacgggctttctgctaaacatagcccggttagccaggatggtctctatctcctgacctcgtgatccacccacctcggcctcccaaagtgtggaagttacaggcgtgagccaccgcacctggcctagttatgtttttagaaacaaattattggtctgcctcatcatatatttatgaatcagtcttaattccatgaatgtcatagtgatgtactgtttgcctctgtttcagaatattggaaagaagatgacctgtcaggagttcattgcaaatctgcaaggggtaaatgagggtgttgatttctccaaggatctgctgaaagtaagcatggaactattggtttttagtgtatgcttgtatttctgtttgctgcttacagcttaatcctaagtaggctaaggatcacttaagtattttgctttttgcttttggttttattggtgatgtttcttttaagccttgtccttgatttttcgtgctgcaaagtaccttaagttgataatttctagaagtctgcattataatcaataatactgaggtaagtaaatttggaatggttggtgatacaaatagtgagtggcagtttttgttcgatttatttgtaaatagactatcagaatttaagaaagatcccaaaggtatatgcactacggaaacagagtagcatttgcaggctataatggaaacagttccaactgtgttcaatccctagtctcagagccactcatgttgtctctggaaatagattaaattaaattctcagtaattgtagaatgcctgaattatttgcatttggctttattattggtaacatcagcatgatgtttttccccctcatcagattgttttcaaggagacaacaaaatcaactttggaattcatgcattctccagcattgtaaatgagatgggcatttgattgagtacaaaataatgataatatgagtatttggggggttgtagggtaagattgtatacattgagaatgtggtttttacagttgtctttttgattctagccttttaaaaaacagtacacgtataggtttcttttggaatcaatttctttaaatgaattttcaagaaaggtgacatttgaatcagctatggtatggaaatgtatgatatgatatggaaatgttgaaagagaagtcctttgttgtgttttatgtaacctttaagctacatagaatagagttctgccagatttggaaagacttatctactatggtaaatgaaagaaggcattacgatgtggtattacgacattcttagtcttactaactttatttgcagcacattacaagaaattatgaaaaaaaaatcaggaagaaaagtagctttaatttatggagtaaagaaggcattttctttaggtcctttgtacagcaagtgctgccatttctaaaggtataaatccaaatgggagcgggagataaatggtgcaggattgtgacgtgataaagatgttttacatcttccattgaatccgtatggtgttaacaagacttttttcagtctagtgatatttgcatggaaaattatggagtctctctaagagaggatttgtgaggcttttatcaacttatgtcagaaatgaaagttgacaggaaaattttcatagtgaagcttttagaatttagtggtaggcttatggtaacctgcatgacggttggcaaattattggctaatttagagcatgtttggcggagctgtatgaaaccgtgtatggttaatatacagtccagaggctactgttcaccttgagtaaacgtgttctttgacttcctctaccaagaatttgccagatgatttgttgctgttgtgcaatgagattatgtttataaacctcatgggaaagtatgtattatttgtttttttgttgtgagaagatgatagtgaaatgataccgaaaatggtggtggttagcatggtaattgtcaagtgaagtattgattctcttccataacaaaccccagccgctcacccacccaagatagttttccatttcagtaggaatgggttttactgaaaatttcagtaagaaaaggttttctttaaaccacgttggtttcattcctctattctgtgtgctgttcggttttccttccctttcctccctttcttcctgccttccttttctcctggtttctttttatttctgtcttttactttctctttggctttctatttttcttttggtgtctttttttctcattctctttctcttagaatagctgtcgctggattccctgctgagataaattattgggtggagtatatacttgaattctgggggaaaatattgttacatatgtgctacacagatacatacatacatagaaacttttcaaaatttggtgtcatcttacaggtttttaatatcatggtcattctctctttctttgccacctttccaatctccatgttacaggcatgtgtgacattaagttttttttgtgtgaaataaaaggaaaaattatgacctttattaggtttcctcataatcatatatagaaactgctagattcaatattaaaaaagcttaaagttacataaactgaggcttttattgttacgtattgaccttgatacttttagattaatttggttcaaaagtaacatttggatttatgtctgttcagatttctttggcccagaagtaacatttgtacttgaatgtctgttgttccatgtcattttgtagctggaaacatttattaaaggtctgctgtgtgtttactaggtgttgtgggattggagaagatgctgaaaccaaatgggcacctgtcctcagagatcacagactactgagaaatattggaggtgtctttctccataaaataaacagttattccatgttgaaataaaagtataagccaaattctgtttttttgttgttgtagttgttttctgaagagaaagggttaagaaaaaatagaccttgacatatttaaatgtgtgagaaatgagaagcttgtgtacagtccttcaattcagttgatttaattaatattttgcttctgaatttgccttatactgtattgaagggatagatgatacattgagccctttttttagtttaaaattccattgcagctttcgttgtttactcaaataacctaaaccgatatttgacattttttcccctacagggtgtttacagtgtaagatatggatatgtgtaataaaagtgaaataagttggatatcagaagacaaccagtgatagcatattacttaggttcttcaaagcagaaggctgggaggaggtgatgtttgagatggtgtattagtccattctcccactgctgcaaacaaatacctgatactgagtaattcataaagaacagaggtttattttgatcatggttctgcgggctgtacagaaagcctgatgctggcatctgcttggcttctagggaggcctcaggaaacctaaaatcgtggcagaaggggaggcaggcacatcttaagtggccggagcaggaggaagagaggaaggaaggagatgctgcacactgttaaataaccatagctcaggagagctcactcgtcatcatgagaacagcaccaaggggacagtgctaacccattcatgagagctccgccctcctgatccaatcacctcccaacagaccccacatccagtactacggattattattcaacatgagttttggtggggacacaaaccatgtcagatggccttttgaagtataggtaaaagacttgttatcttggttattattccattgcatttcctgccccttctttcacccaaagacattctcatatttacccctctcaactacatgaccaaatcaagacagtcattcatataacaaaataggccagatcatctggtatgattcacatagtacagataaacacagaaaaatttgctactgtcttacaagtttctgattaaccctgtgatcatgtttctactggctccacccatcccagcggttggatgtggtttgtattcaagcatccttggggacaatggaagagaaaggggaggttctgctttgggtctgatagattttgtaaaacattcgtaaggctctaataagtattacaggtactaacgacgtgaataaagagggataagaatgtagaatgcaggctagctctgtattgtaggctgtgttttgagagacagtacggtatgaggattgagattatgatttgagaactgtactgactgggttctaataccaggttctgtctcttaatagtcaggggactacgtcaagtaaatagtgtatttcaatatcctcatctataaaatgggagattttagagtcctcacatatagtaagtattgtctgttagctattaaaactttttatttttgatattattttacttagcctaaagtgggctggaaggaccctatcccttcctgcaggtatctggttttaagactttttagaggcgagtgagattagcggcagtagtcaaaacctctacccaccatccctttttagcttgctgctttccaaagatacatagcctctgctctttgaaaggaagcacctgtgacgttgactgaaaatgaatcttgcttaacccttacctttttaccttgttaacagcctctttctcctgggcctatccttcttcccacatttttaaacctgacgtttgatttgcgtttttagtgacttccctctttgatgctacaagaggggaagtactagggtgcattggctcttgaactggtcctggaatcttgaagaacctttgaggaagcaaactagttcatattctgctaagatcccaagattatcctggaatattgatggagatgtgaattacttgaagtgattaaaacatccctgggggagacaagggttgctagagatgtgccttcctaatggagaggcgttggtctgaaggatcaggtccaggaattgttgggattctgctttgtctcggggcaatttttatggactcttgactgtgtcagcctggggacttctttcacccagtcttatcagcggctgataccaactagtgaagtgttagcttttgattatgtgcatatttctgaaactcttcactctgtagaataacctttgaaaattcataacagcccagatacggaatcatcctaaatgttcatcagcagacgaatggataaaatgtggtagatatgcacagtggaatattatttggccttaaaaaggaggaattctgtcatttgtgacatcgataaatctggaggacgtttcactaaatgaaataagccaggcacagaaagacaaataccgcatgatctcacttacagtggaatctaaaaaagttgatctcacagattcatggagttaaatggtggttaccaggggtctggggatggtggggatttaaacaaagggtacaatttcctttcgactatataaataaatcatagagctttgttgtatagcatggtgactatagttaataacatcatattgtttgtttgaaaaatactaggagaatagattttgaatgttctcatcacaaaacagtatgtgaggtgagaaataggttaattagctttatttaatcattgtacagtatgtatgtgtactcaaaatactgcattgtgcaccacaaatatatacttttcatttgtcaattaaaacatttaaaaataagaattttcttgaaagttcctctatcttaatgttcaaaatgcagtgtcttgatcctctgcatttctgttccctgaattttatttctactgagtttcttaggaaacccttgttcttgtttgtaacagaaaagctgcgtttctatcttctatcgaatctgctctgcatttctaactctggtggttgataattgtccatttctcattatatacagaaaagacacagggcctttcagtgatggtcaccaggtatttatatatttagagatgaattgtccatttgaaaatgtatttacatgaaagaagggaagaaactgagaaataaatgacaagaagatcctggcaaatggtctaggaacataaagggtggaaggtcagttattggccgtcccataatttcattctgaagagacatctagactgtagattttgatatgacatgaacccaattgttttctatcccactttcccattgccatctaccatttaatactctgatactgctctccttagtatttttattccagtcattgttagatctttatttcttttttgagcagcagttaaattcagtaagtaccaagggagagtagaaagaaattagctgaaacagtctctcctttaaaaatttttataccaacttattgatggaaagaacagaaacaacaaaacaaaatgttccaaatatttgtgataaaactgaacacaatttgcagaatgtttaaaaacataccttgaatgtatttaaatacacaagtaggtctaagaataattctagttagaagacagtgtcactggaaatcatttaaaaacgtagggaaataaatcttacagataccaatcaatatgacagtcttttaggttattgcttgctattagatgtttgacattagaatattctttaaatttttaagtttttttatagaaattgctttacttgggaatttatgaactttgaaattagcacgtcttcccttaagggaagagcaaaagttttaatgtggaagaaagagagagagagagagagagagagtgtgtgtgtgtgtgaagaatgggttaaattgaaaggatgtaaatcagtatgcttggcctagcaggatttataagcttcactccatgaatggagtgataaaaaaacagtgaattaaattgttacatagtctgttggttagaattttaatgaaagttgtcattcaaatacatttgttttcccttgctttctcaaaggacagagtttaggcaagattctcttaggagacagttccaagaatatgtaggatacctccatcccgtttttaacctatcttgtcagctgaaaggattatatatgttgttttaaacataattttctcatttggttttcttaaggaaaaataatttgtgaaaatgatggagtaattagccaagaaggtagaatttaaacagactcaaaagatcagcaaagataaaacacattttaaataaagattaatgcatctttttggataaggaagaaacataattagaaaatataaagtgaggctctcagatttgtaaccattaggctttttaatcagttacagctgtatataagggtaaagaacaacagatgaatcagccattaaaaatctagagataagccatttttgtaagttcaaaccccaaaaaggatctgttcacacggagtgacagcaaaagctgtaatgattcttcttaaaaaaaaaaaaaaaaagagtaaaactgacccatctctctttctgagttccatctacccctttcagccagggagaagattggaaatttaacactgacaattgccctacttttcaatattttctaccagaaggcttaacctaagcaacatgaagtcttttttccctatttgatcttcccactctcattgttgctctctcctctctcatctttacttcctgattatcgctgagtacaagtatagctggagacatcagaataagactaggttttattaatgtcaacattctggtttgtgctatcatactatagttttgcagatgttaccattggaggatactgggtaaatggcacaaggactctgttcttttcttacaactgcctgtgaatttgtaattctgtcagtaaaacaatgacaaaaataatggacaagtccactctaaaaaaaaaaatggggcagtttgtctattcagccagaggttttaggcatcatataaaaataggcttaatgaaattttactactcttggtcattcttttaaagtactgagtacagtgtaatgaccaacagttcagaaataactatataacagtattaaaaacactgacgttttaagaaaaagacaatgggaattgttttgaagaattgaaaactggaaagtaacatgatcctatgtttattgtcatgttttactctggatatttgaagaattgtttaggaaagtggaagtggaaagatggtaaaatcgcaattgtctatgtgagaaggatggtggctcggatgctggtggtgacagtattgaaggaaatatattaagtattgaattatttagagcttcctattagagattctgctggtagactggtttcctcattgcccctttgtcccttacctgaacgaagtagaaaagaaacaaagagtagaatctgaattttctctacgcagttaatgtttgtttgtttgtttgtttgcaacggagtcttgccttgttgcccaggctggaatgcagtggcatgatctctgctcactgcaacctccgcctcctgggttcaagtgattctcctgacacagcctcccgagtagctgggattacaggcatccaccaccacgcccagctaattttttttttttttttgtatttttggtagagacagggttttaccatgttggcaaggctggtcttgaactcctgacctcaaatgatccacccacctcggcctcccaaagtgctgggattccaggcgtgagccaccgcgtccagatcccagttaatgtttatttggcctgttaggctgaatgtcatggaaggctgtgtggcagagtaaaatgagtagttacagatctggaaagtaatcccaatatcttaccttggccaagcaacttaatccttttcagttttctcaggtacggcatgggataaaaacaccttcctctaagagcggttaggagaattaaatatgatgaggtgtgttaagtggctagcagtgtgcccgtgtggaatgcactagttgttctgactgggttatggaagtcgctgggctctaagcctgtcttagtgttgctagtgactagtggtggcgcctccgggtgatcatttcactttgtgcctgagtttcctcatttgtaaaataagatatttggcctgtgcctatggttttcaggttttcggtttaggcttctggagcctgtgtccagtgttcactcctccctgtcaccgctccccttctgctccagaagttgttctctttttctgtcatgttctaacttcctctggtgatgtcttttgagcaaaatattatgtggcaaaaaagaaattggaacaacttcacagggtgatcttgtaaggatcgtttcagtctaagtgctgggcattttcttaacgtcattttgaatccaaatcgcatttctaaagtgttaactctcttagctctcaccttgtatttactggtttagacaaagaagtgtatacttaataatgaaaccagagaatgttcagatttaaatccaagaaaattgcttttgtcattgcagcattttcaaaagattattcccaaaggactacacaagaggaagaagcagacctcagtcagaaaaaggtctgaactttttataaaggaaaagcctgaactgaattctcaaaaatacttgatctgagttatattcggagtatgtagttgaaaataggaacttatgggtggtatttaagtgtagctaaaaaaagagcatcaactgttgcctagagtaggtgagttctttccaagagaaggtcatggaaacctggtagcaacagtatccatggaggaagagggcttggatgcctgtcctgtgtaagtcggagagccttttaagagaaaagctaggtttgcaagctttttaagagaaaagctttaaaggttctggcttaaaatatggaatattgctgcttttttcagtaaagtaaatcaagctgagttaggtgatgaaaggtgcgtggcgtgtttccgcttctgccctccccgtggaggtctggcagcctgctttcgctttcgatcacgtgctcatcatgggcagaataatgatgctgcttttggtgtggttcagaccatgaatgaaaaatggtgacgataatgagggtaatatttgaagtaactgaagatccacaaatcatgttcatgtgttttcttaaaaaaaaaaaaaaattaccaaaaagaagtctgttacaatgttttaacagaacagatgctgcttaagagtacaaacagatttttaacccccaaaaaaagaaaaaaggaaaaaagtttgagtggtggtggttgtaatcattaagggtactgtaatggaatattaatgattcccagtgggaatttatattgaaatttattttcaatttgatcatgaagaagtgctacagaatttcctattcagatgcatccatagacgtttgaatgtttgtatgtttggagcatttttatgttatgttatgttatgttatgttatgttatgttatgttatgttatgttatgttgagacagggtctcactctgttgcccaggcaggagtgcagtggtacaatctcggctcactgcaacctctacctcctaggttcaggcgattctcctgcttcagcctcccaagtagctgagattacaggcgcgtgccaccacgcctggctaatttttgtatttttagtagggacaggggtttcaccatgttgaccaggctggtctcgaactcctagcctcaagtgatccgcccaccatggcctcccaaagtactgggattacaggcttgagctgctgcacccggccttgtttggagcatgtttaaagtgtcataacagtccaagattgctgcccctctcactaacatgagcatgtattattgatatgaatgtaactggtcacatcatgaataaaagctatcctctttttgcttatgatatgtcaggagactgaggagctccttgggatgattgatgccctcctttcagcagaccagcaatgcaaggataagtggaactaccatggcaaatattctatcctgaacatggtatttacttagccaataaggatacagaaaaacaaattttattttaaaggcatttataattatatagtcaaaatatcccataaaggaaaacagtgtgttgttatagtaatgcttcacttagctaaaggtcaatctttttttaaaatgactaaaaaaagtgaaaacaagcaaaaaaataaaaataactctcaacagccagaataattacagagtccatgtattaataactgacctcacaaatttcacacaacctgtatttagatcctgtttttaataatacccacaattagttttcactttgaaatttttgacctgatcctccccctggcatatcataatcttgggcctgtagacacaggcaaataccagcatacaagttactgctgactatcaccgagccagctgttcgtgggcaagttaatagccaaatccaactgattttaataagatgaatttaatagaacacagacatttaggttattacataaatttttaagtggaaattattcatttattaattttgagatggagtctcaccctgtcgcccaggctggaatgcagtggcgtgatctcagctcaccgcaacctgtgcctcccaggttcaagtgattcccctgtcttagcctcccgagtagttgggattacaggcatccgccaccacgccctcctaatttttgtatttttagtagagacagggtttcaccatattggtcaggctgatccggaactcctgacctcaggtaatccacccacctcggcttcccaaagtggtgggattacaggcgtgagccaccgcacctggcctaaattgaaattattttaaagaaacaattgttttctcagtttggccatgaattagaagaatggagttcaaggaagtgatgttcctcagatagaggggcagtagcaagaagtgatttgctaatgaggtaaagagaaaatgttgcaaccttaaagggcactaggtctccaaatggtacatctggagttgttttgaagagaggcagtcaaatctgtgtcgtcagtagcctctcagaatggctgcattacagcactgcaaagtaatggatgtacttagtgagtcatcaaaaatgttacattttgtttacttggtttgattaaggagacagggagtgtgaaatagattggaaagattgccagtaaaactatcttataaagattttttggcatttaaagaaattaccttcaatcagaaaatgcgctaatgtaggataattcatttctctatctaaaaccattcttgaactctgttccctgtcaatgttggatttttactgttatttaaaacattttatttgcttgttttaattgttttaacatttactcttcccttaaactttccatagatagcagcatagtttttgtgctaaattgttgtttttgcagaaacgccagaagccacattatccagatcttgcaaggaagtattttctggataatgcaggtacatgaactttcctcttcacaacataccatcttgtcagagggagttcacacattcttttcttttgtgtggatttttttttttttggagttggagtctcgctctgtcccctaggctggagtacagtggcatgatctcggctcactgcaacttccacctcctgggttcgagtgattctcctgccttaacctcctgagtagctgggactaaggcgcacgctaccacacctgactaatttttgtatgtttagtagagatgggatttcaccatattggccaggctggtctcaagctcctgacctcgtgatccacctgcctcggcttcccagagtgctgggattacaggcgtgaaccaccatgctcatcatcaccccagactgttgagaaaaatcctgataccttcacactttttcccagaaaaaaatgaacttaccctgttcatttggaaaccactgccatttgtaaaagatcacagagggaagtgaattcctgctcctggagcaaatcatgtcacgatgaggttacctattctaaaagcaatcaaaagcaattattccttgagaatgcaagacaggtacattgttactctttttgcctcatttccatgctctttctttcactcccaaaaacagcaatgaaaggcaaatatgtatactcaaaatcgtatctcgaaaggttatttgcatttcaggttgtttgtcatacagtatagacttagacaaaaatatatatatattatatattatatcatatatgattatatatttgatatatatcaaatataatatattatatatattatatatattatatataatatatattatatgtattatatataatatataatatataatatatataattatatatataatatatataattatatataatatatataatatataattatatatattacatatattatatatattatatatattatatatataataatatatatatttgaaaagttagggattttgagaacttactgattagatggtggtattgcttatcacttgcatttgatctccttccttccagtattcttaaggacaagagaccctcctgttggccacagtatgcctcatacctagtgtaattcttagaacagatcagatactcaacaaatactcattaaagaaataatttcagttttccgtaaaacacagtgtcagtgattctgcatgtacaacttgatattgtatgtagaattgttaatgtgtgtaagtatatgcataattttttattttttgagagagaggagctatacctatgatcagatattcagatggttgctcactgcaacctccgcctcctgggttcaagtgattctcctgacacagcctcccgagtagctgggattacaggcatccaccaccacgcccagctaattttttttttttttttatgtatttttagtagagacagggttttaccatgttggcaaggctggtcttgaactcctgacctcaaatgatccacccacctcggcctcccaaagtgctgggattccaggcgtgagccaccgcgtccagatcccagttaatgtttatttggcctgttaggctgaatgtcatggaaggctgtgtggcagagtaaaatgagtagttacagatctggaaagtaatcccaatatcttaccttggccaagcaacttaatccttttcagttttctcaggtacggcatgggataaaaacaccttcctctaagagcggttaggagaattaaatatgatgaggtgtgttaagtggctagcagtgtgcccgtgtggaatgcactagttgttctgactgggttatggaagtcgctgggctctaagcctgccttagtgttgctagtgactagtggtggcgcctccgggtgatcatttcactttgtgcctgagtttcctcatttgtaaaataagatatttggcctgtgcctatggttttcaggttttcggtttaggcttctggagcctgtgtccagtgttcacccctccctgtcaccgctccccttctgctccagaagttgttctctttttctgtcatgttctaacttcctctggtgatgtcttttgagcaaaatattatgtggcaaaaaagaaactggaacaacttcacagggtgatcttgtaaggatcgtttcagtgaggggcttagcacccgggccagcggctgcggagggtgtactgggtcccccagcagtgccggcccaccagcgctgtgctcgatttctcgccgggccttagctgccttcccacagggcagggctcgggacctgcagcccgccatgcctgagccttccccgcctccgtgggttcctgtgcggccggagcctccccgaagagcaccgccccctgctgcacggcgcccaggtccatcaactgcccaagggctgaggagtgtgagcgcatcgcgcaggactggcaggcagctccacctgcagccccggtgcgggatccactgggtgaagccagctggtctcctgagtctggtggggaggtggagagtctttatgtctaactcagggattgtaaatacaccagtcggcactctgtatctagctcaaggtttgtaaatacaccaatcagcaccctgtgtctagctcagggtttgtgagtgcaccaatcgacactctgtgtctagctgctctggtggggccttggagaacctgtgtgtccatactctgtatctaactaatctgatggggacgtggagaacctttgtatctagctccgggattgtaaacgcaccactcagcgccctgtcaaaacaggccactcggctctaccaatcagcaggatgtgggtggggccagataagagaataaaagcaggctgccggagccagcagtggcaacccactcgggtccccttccacactgtggaaggtttgttctttcgctctttgcaataaatcttgctactgctcactctttgggtccacgctgcttttatgagttgtaacactcaccgcgaagatctgcagcttcactcctgagcccagcaagaccacgagcccaccgggaggaacgaacaactccagacgcgctaccttaagagctgtaacactcatcgcaaaggtctgcagcttcactcctgagccagcgagaccacgaacccaccagaaggaagaaacgccgaacacatctgaacatcagaaggaacaaactccagacgcgccaccttaagagctgtagcactcaccgcgagggtccgcggcttcattcttgaagtcagtgagaccaagaacccaccaattccggacacagttctaatgcccactgagacttgaactattaaataggatataatatgaaggagaatgtgttagttttatattgctgtcgttaacaaatcaccacaaacttagtggcttgaaacaacacagattgatcattatctcatcgttctgtgggttagaggtttgggtttgcttggctggtttttctacttctggtttttccatttccaaatcaagatttaggcaggactgtgtctatttctggaggctctgaaggtgaatctgcttcaagttcattaagcttgttggaaggattaagttctgtgtggtcataggactgcggtcccccttttcttgttggttgttgcccaggggtcctcctcagcttctagcggtcacctttagtcctttgcgtgtggtccgctacctccattttgaaagctagcagagatggcccaagttcttctcactctctggtactgtctgacctcctcatcctcttctttttgcctcgtctttgtctggtttccttttctggtgcatcttctgagtgcctgttctcccttcctctttgaaggtcttgtgtgattacactgggcccacccagataatccagaataatctccctctattaaggttagttgatgagtaaccttagttccatctgccgtgtgccttcttagcagtggctagatgaacatttgattaaatcatcaagggatgagactcttagggggccagcatctttaaaatcctgcataaatgcggaattacgtataaaatactgtgggatttcagaataaagagaaatgactttcaactgggcagcatctggaaaagcccctttgagatggtagcaccttgtcgtctattgaaacgtagttccgatgggtgctatagagctggagtagaagggactctggttgtggggtaacagcttagatgccagtgtggagacaggaaggatgataacgtgtggtccactaagagcagccatatcccttgaatgtactccatgtgttagttactatttacagagttattcaggctcctaacatcagatttttctagatcaaagtagaaataagaggaacgtcaagaagataatcaacacgtagcatgcagaatcattattttaaaaggactaagacagttgtgtggtgtgattgttgtaccaccttctctttggctgttagaaagaactgagtagcgttacacatgaaaatgtgaaatctgattttcttatttctaaacttttaaaagctccatatctactgatacaaaccagagaatgtggcctttgggaaaagtctcccactctccttttgtattgccccacagggcttacctctgtgaccattctgagtgggctttgtaccctactttaggtggatgataacttcagcacagtcccagcttgtgtggagagatgatgaggtcatgttggcaggtccttggtgtctctaaacattactgccgtattataactgattttctataacaattccacataaaggaaaaatcttttttttttttttttttttggagacggagtctcgctctgtcgcccaggctggagtgcagtggcgcgatctcagctcactgcaagctctgcatcccaggttcacgccattctcctgcctcagcctcctgagtagctgggactacaggcgcctgccaccaagcccggctaattttttgtatttttagtagagatggggtttcaccgtgttagccaggatagtctcgatctcctggcctcgtgatccgcccgccttggcctctcaaagtgctgggattacaggtgtgagccatcgcgcccagcctggaaaaatctttattagcgttactctctaccacttcccttccttttcacctaatttatttataagctttaaaaagagttgtatatacctttttattttgaaagcatgcatctatacaaaggagtcacagaatactttctgccaacctttgaaaaatacaaaggatgtaactgcccacagttgcttttcttcagccttttaaagtgtgtatacataagggctaaaataacaaaaccagtgcagccagctggtccttttttcacatgctgcatatgagaaataggattaaaaggggaagttatggtggcagaaagccaaggggtgttttatgagagatcagcaatttcacttgcctttggtgactcatattttgcccttaaagcttctagtacatacgaagacttccgtagtctttccaaacctttctccctctctcttgccagagtttgttttccttccttctcttcccaccttccaccgaaacctgaagtgctggtcctgatgattagaggcctgcaaaaggaaactcgtcttcttctgtgtctttttttttcttttttttttactcactttgataagaaaaatagccttttcttggagttgctctctgcatactgagcagacattggtacacatgtaattcatatagtagttaattggcactatttagcagctggaaaggaagcactaccttccttaccatgtggcagtctcattcttgtcactatccagccataatctctgctggtgttctgattaaagctttgtgctttcagattcagagacactgggaactgtttctggtttcctctttttccattcattttcccactttaatatgctaaggtatgttttctgataattcagaaagattgctgttgctttcacctgtagttttctcttcctgtttccacaatgcatctgactttgagaatacattactttgcccatctattatgtcagtcatgtccacttctggtttctttcctgtagggaaaattgattttttaaaaatgaaaccaaacctttagaaactctcttaggtaatttcttccagctctcatgttcctatattttccttgtttgtaatatctaattaaaagcttattataaggatccttccagtgtcgttaacttcaagtaaactgtgtctgtacacctgcaggtacccacatacatttttatgaaaaggccaagctccaatttgtggtacatttttaaatcgttagtattaagaattgaagatgtgggggcattatttacgtttgagaagcccttttcaatcttaaaatctatagggttctaagcttcacattatctcatatgaacaaaggtgacaccgccatttaaaaactgaggctatgcatacacaggtagagagagagagcaagcaggcacatggatgcaagcacaaacatgctgagaaaatatccatgcctaagggcatttctttcagtcctcactgaatgtgcccttctattcatttgctacattaaatcacaaccctggcatttaccctcttaggatacaaattaataattaagaccaaccagtccatgaaaactcaaagtggaaagtataaacagtaacaaatgaacctaattgtattacaaattaagtattttgtaatttacactaaagggaatggaaaaggaaagaacgaacataaataattttgaaaaacagttttttaactgtatgccgtgtggttgaagacaaaaagaacagtacacaaacactgtactccagttagtaaatttgtcttttacaggggtatgagctattaattctgaaactattactgatgcagaatttttcttcttggtcacttcgcaaggtggggacccctgaccagcaacaccccccctggacctcccttggccacgctggtgtgccccagcttacctgtgttagagcttgtacctttgtttggtgtttccgaactcttagactgcactgaagaagaatgaggacacgtggggcatggaagggtgaggaggatggagaagaatgttttcgagttatgaaaacggctttcagcaagggtcagcaggggagggagggggttcctctgtgtggctgggtctggggccctttatggactcagaatggggagtgcatgctgattggtttgtaagtatgcaaaaaagattaaagcaaaaacaccactcaaaggtgggcaggacagtgtagaaaaaccaattaggaaagggtaggaaaccaattaggaaagggtatatgtaaaatacgtgaagggtggggacccatcagaggaaagtatgccagacaggaagacactctcagtttggtccaaagatttaacttgtagctcagctttcaggctttaaactatctttggcctgaaggtaggattttgcaggggacctgcctctgtctgtctgtctaggcatttgtctgcctctatcattactttatctgtatactaggatatgcaaataaacaaacatactatagatgataagaggcagttttctctctatgggagaaagaaattatgaataaggaaccctgtggtattggattccagttgacgttattcatatgaacttgtaatttttaatgtatggattgatgcagaaacgtaggtgagtttgcatgatgggtatgtatatatgcatgtaaatatacgcctgcatatatttcttagctctgcctgccgagcggatctagaagcactgatatctcaatatcaatgagcagcgtagcttccagaccttggtttctaaatactgttcaccagtaaaatgaattaatgctctgtggagaattggttggttgtagtcctggggcagggaaaatataaaatgagcctagaacatcttgtggtgccagaaagtaagtgctcaaaagaagagggtggtgtgccagaaggccaacctagccaacctggaggagctcctaatggccaaagctggaacaatttgagcaacaaagtgatagtattagattatactcagagaagaaaatgaatatccgttgaatacattttaaaaattgtggagaagggacaggtttttattacagaaaaattttaacaattgtgaaaggaaaggaggaaatggcaaatatcgcagtaattattgttgttgatagagccattgaaggatactaaatttagtagatgaaagttagggaagaaacaggatatttgtgtagtctcaaagtatctctcccaggatatttattcattatgaggggaaaatactaactttacaatgtagacagtgaaagataccaccttaaccaagtgatcaagattaacatcaccagtggcaaggcatctcaacatcatgaagcctctgatgctctaaaggagaagataacatcacttaacatcacttctctttcccaaaatgcctaacttcattgtaaacatgagaaaacagcagccaaacccaaattgcaagatattctatataataactggcccatcttcttttgaagtgtcgaggtcataaaagacaagggaatactgaagaactgtcaccaaatggaggagactaagaagccatagtaactgaaggccttgtgggttctagagaggatcatggaataggacaagggcagtaatggggaaactggtgaaatttgaataaggtgtatagttcagttaatactataccaacattaacgttctggttttgataattgcactgatggttacgtaagatgttaacattaagggaagactgggtggaggatttacaggaactctgtaccatttgtacaacctttttgtaagtctaaaattatttcagaagaaaaaagaaagatgctgggtagttaaacgtacaaaggtatgtgtacaaggacattaaaagcagcattgtatacaatagcaaaaaattgagaataatacaaatctcgatcagtgaaggattacatcagttatactttattcatgtaattaatacagttgttaaaaagaccacgtagagttatgagtagtggtatggatggcaaagtgaagagaaggggttaagagtatagcttctttattcatgctgcctggattctctgatacttagcaccaattctgtgaccttggggaaattattcctctatcagcttcctcatctggaacttgggaaaagtaaatatacctacttatgaaccaggaatgaggtttaaatgtgaaaatccatgtaaagcctacaggatgatacttggcacataaaaaatacttcataaaatatgattacctaattattattttcaaggaattgatggtggggaacatcaatacaaaattaagtatggaatgataccatttatgttaaaattcatatgtgagaatctagaagatgaatgtgttaatagtggtgatgtcaggggagcagcatattagggaacttctgggtggtggtggtggtggtggtggtggtggtggtggtggtgagagacagagtttgcactttcacccaggctggagtgcaatatagcgatgcaaccatatctcactgcaaccacaaattcctgggctcaagggatcctcccaccttaacctcccccctcaaagtagctgggactgcaggcatgtgccaccaagcctagctaattttctttcttttttttttttttttaatagagacagggtctttctgtgttgcccagattggtctcaaattcctggcctcaagtaatcttccccctcggcctcccaaataggaacttccactttctaagttaaatattttaaaatttattttgcataaagtatactgaaggtatccagggaacttcactccaaaatatggctccctggtataataggtattttgaatgaaaggttcttagagatcagtaaatgtgggaagagacttttcccccatccaagtaaagactggacccaccaaggagaacgactgtttgtccttcacctccttgttatctcattatctattgtaacaaagaatactaaagaatgtaagcatgctcgaacattttctaaagaggaccatttacaagttcatctctgttttcccatccgttcattctccttggtaatcatttattgccctttgacagagttccctgcattcgctatctccccgctcctctatgaaaagaagctgtaggagtatgttggccccattggaatatttggggaatcactctgtgattgtcccttgtacatattaataaattgtatgcttttttcgctgttattctacctttggccagttgattttcagtgaaccttcaaagggcaaaggggaggtttgccctttgttcctgcaatacagttgaagaagtatgcatagcaacttttaagagaagcctgctatcaatatttattaagtaaaaccagccatgaaaactatttctaaagctaaaggcatcgcatagtgtccaaggtcatatgacttgtccctcacattggaaattgtaagagacctgactgtgctctcagccacttaaaactagttgatgtctacagttctctgaaatgtgggtcttaacttggaagattaactaattactctagtgtataatcctaggttgtgaaaggttatggataacctaggtaaggatgggtatgactagctctttgtctttatgaaaaataaaccaaatggcttctaaactgtagcattttgccagtaataaataattcctgacatttttattagagtgattaaaacctggagttgggcaccaaaatggtgatgtaatctccaggactgaagttaaaaataggatagatatcaattgctttttaatctttaggtggtgatgggccaactgagttacagggggatccggaattcactaataccttcacaaaagctatctatgattatatacactgtaggtaaaatatatatggaaataactacatgttttcaaagaatatgcttatatttatattttggatataacatcagtttgtttcacgattataaagattttttcttccttgcttggtttgatgcctgtgtcattctgaagttctttatagtgtttactagagaactcagcctgaccattctaatttaagtgtatacaggttacgtagcaaatttaaggcccgtctgtctttgtggttttggtgatactaggttggttgcttggttggttggtttgtttctttctcttttttcttttttggtaaatcatatataaagcaaagtataccaggtttcttaaagaggtatattgcaaggaaataggaagatgattctaagaaattagaacaaaaggtgaaactttcttctgttctcttggacttgtgattcctttttatatcttccctattatagtccttttaaatttgaatcaccaaagctttccaaggataaaatgaaaatgtcgaaagcattattttcctcatattactcctggtaatgtttttatacatttttcatcctggtttcttaaacactttcgtttaagtatacattactggttgaccagctatttttaaatcttttagatctcatttcagttgtacttttttttgtcagggctccacctgcttttttattctgtttgcaacagtcactatttcatttgttggtaaccatatggcatagccttttttttttttttttttttttttacaataaaattagatgcagtgtgttgaagcccatattgttgtatcacagtctctggagagcttaaagtaggtgggagagggcatcccaaaatgcagcatgccgctgataggacggataatcttagcacaggattggattttaaaatactgcatttcaaaggtgccgacatatgtagctagtgccagtacaagagtagagtctatagatgaatagcacagctgcagtgttggtggagttttccctcctatttcccaaatactttggtttcttaaattctaggattgtttttaaactcttcttcctgcacactgaaattctaagattttaatatgatataagctactcccatggaccactgttgtaaagttgagatcatcatggtaacaaactctagggaaagatcaatggactcttggagtcacatcatcttggttaaagttctgaccctgacacttactggcattgtgacattgggcaaattaaggaggctttcagagtccactttctctaaccataaaatggagatgacatcgcatcttgtgaacagttgttacaggaggaaatgagattacatgtgtcacatgcttcgctcgttctctggaccgtaactcgtacctgtaagtgtccttccttcctttctccccaccacttactctcatctccctcttactcagtgttgtgttttctaagatttaaaaaacagacaacagaaaacaatattttaatccctttttatgttaggatctgaaaatctttagatatttcctttctccctttcattccttcattcatttttggctttgcaccaggacttatttcttgagggtcagataagccctctgacctcagggaggcacccaggttaatccacactcagagaaaagccggaagtcactgggaaagtctagtggaagtgctgaacccggaagcagctggaaggtaggggaagtgaagtcagcctcacagagctgaggtttaagggacattaggaggactaggagacaaagtcgtgggacagagggaatcatttgttcatttgaatatgaggatgagtgagagagaggatttccatgtgacttttgggatttaagtacctggtagggtcatttcactgagataaggaatatgagcaggttattagaaatggaagtaatcttaaaagattttctagatagtctgatattcctaaatcattaggtaatgaaaccgaggggctgtcaaggttaagctcaaaaagcagttgagattcatccaaggtcactcagactctctctgccaataataagagggcaataatgtgactgctaaaagggcccttagagaacaggactgaaggtgtgatggattctacttgagaattttgcaaatgaaacccaacacagttttctctttgtagctagggaaggtcactgcaagctgtcagaattgaggagaagtgaagtggaacagaaagggtgcagttgaggtcagattccgaggagagagagagtaggttgccaaaatttagtgctcataaagcagtgtgggggcgatccaggctgagttaacacagcaggagctgtcactgtggaacccgtgtcagcgtccagttttgcgggccagtcggagatcagacctgggaacagaagacaggaaagcaacgccgtgctaggggaatgtggagtgggtccagagcagctccatggacagcagctcctgctcgtggaggctggctggcctccactctggttgataggaacatcttgcagttttgtccctgtgagcttgtccatgcacaagaaagttactacgcagtctgttatcccagatttgatattatattatttgtgagttcttgacatttcttttagaaataacttatgttctaaagatagctgataatgttactttcatctgatttctaatattctttacaaatattagaattagactgatgaagacagatactatagttgatcttagccagaaagccaggtcaatttcaaatgttctcactgcaaaaaagtatttgaggtaatgggcatgttaatttgtttgatttgattatttcacactgaattttcaaatcataatattactttgtatcctcaaatatatacaatgataagttgttgatttataattaaaaaatgtggtttatttttttgctactataaataggataaattagagccctgtgaccatgctagctaatagtggtactgtatttataaaatgaatgtgttatctttagctattagacacatgaaaaatggaaattagaaaatagatttcaaagtacatattaccttcttctttattttcaaccctataataaaacagatgttttagaacactttctggttctctatagagtccagacaaaggcactgtatttacatgtgttgttttccaggtttgcccggcctcttgtttctttaaatactcttggtatttcaacagcgagtttataactaataattaagtatgggaacacctattttttcccttaaatagcttactctttttcttccacaaagatctgtttattgcctacagttctatatttttgtgggggaatcatctgcttccttgttactgattataactgggaagcattttcaatttaaattaatttttggttggttaatattcttccttaaatatatttattactaaatattcatccatctgaagttttcctagttttccatatgtgccttccaaaatgatttttgaaccacaaacatgtttattaattaaatcactaggcgaaatccgcctttagtccaagttgttctgaacaatctgtgatacctaagagccgaaggttcttcttaaaaggaaaagaaatccttgtggtatttttttgtctttaaaatatattaaaaggtacatttcagaacaaaaaaaatgactagaatttttttctagaatattctttgaggtgaagggatttcttggtgttttttttgtttttgtttttttttttcggagcgggtgtggtatagcttacttcttagcaatccaagaatagcatttctggaaagtgatcagtcagttcaagctatagtctgcccttgaatgtgtatgctgtttatatctctgtcatggagttatcaggtggctagtacgagtctttattgctgagagtaagatgccagtttgattttcagcctacttgtgttaaggtttaacctgtgatggaattcacatttctgataatgattactgtattaaaaatttaacatgtgatgtgtatggtagatcccttttataatatggctgctgtgtggattctatttagcatgtggtagattctgtccacaggaaaagcaactattcacagtataaacatcataggccagccctgtcctccttgacaatgcagatgttatctcatcatagaacattgtaattcgaagtcacccttgagatgatcttgatgaaccttcccattttataaatgagaaaaggagtttcagagagatagtgagttgtttaaggccctaattagtgtgggtaaagacagaacagagagaaggacagctacttgtccttctcactgccatggttttcccacctgccaggaggcctctaatttgaaatgatatgcaaaattggtcaccagaaagtcctggtaacagtttgtgatgtagaggctgagctgtggaattaacattcagttctgggcttgctcttctttccctgtgaccccatgttagccattcggatttcctgatttccattcctttgcccttctcccaatttcacactgattaagacttttaaaatctagcaaagatagcttctagttggtgtcatctgcaagcagaaaataatttataagcagtttctcttgatcacaaattgagtagagggagcctctgcctcctgcctgtgtgataaggatctgtgcaagggcatacttgcaaaaacaataggaaatcaggctcaagtaggtcaaaatcaaagttagaagtaaaccccatgatgcaagactagttttgtgtatattttctactgaagttcagtgaaataatgtctttaaagttagaaagtgataatagaccagagaacagtctgtaccctggggaaaaaaaataaggtatatactttcccctccgaaactgatatttgcaagacttatttatagccttatgcatattataaagccatagaccttttgagtaatttattgaaaatagcatagaggccaagcgtagtgactcacacctgtaatcccagcactctgggaggccaagcgagcagattgcttgaggtcaagagtttgaaaccagcctggacaacatggcaacactccatctctacaaaaatatatttaaaaaagtaagtcccacctctcgggaggctgaggtgggaggatcgcttgagcccaggaagccaaggctgcatgagccatgagcatgcactgcattccatcctgggctacagagtaagaccccgtcacacgcacacacacacacaaataaacaaatagcacagcatagtacctgggttcaaattaaagttccattattttctaactgtgggccctatttttctcatttgtgaactaatgcagtgtttctcagctgtggctatatgttagaactacctgggacaattacaaagactaaagaaaacaaaccagcaaaatagtgcacagcctctatccccagaaagttctgattttaattgatctggaaagagaacagtattttttcagatgctccccaggtgattccaatggacaactaaaccacaaaagcagatgactttgaagtccttttcacattttaatattctacaattctgagatttttttatgtcatctagtccaggctcacactcagcataatcatctctctatatttgaaaagcagcattttgtttttaatgttagcattcatttggaaagaatgctcattgccatcagaaagctttgatttaaaagatttttctgatcatcagccaaatttacctttggaaaaacaaataataagtctaattactgatttaattgatgacgattctgatatttgaagattacttctatgattcagcaaagttacctcttcttaggtgaaacctttccaatttttttcatctcttgtttttgtgcaccattatttccgtatctcaacatgctattctgctctggggtaatctgcccttatctctataaaatatttccctggagttgaactacagccccattgatgatcaaaggagggaacttggggattttgggtgattattcccttctcaaactcttactgaatgtaggattaataaatagactctagttttagtaaacagtttagtaaatggtgtttactaacacatactcgtctataaatatgtatactaataaacacagttgatgataaaattcccagcatttaaaaattttcatggtgtgccaggcattattctagtgtttaaatatattaacacatttgattctttcagtaacccttgagggtaggtaccattattttactttttagatataaagaagaaacagactaaggagcagagtagttaagtgtcttgccttcaatttcacagtaagtggcagagctagagtgttgattggataatatagggcatcttattccagagtttgtaagtatggaagttggaggttatagaaattacgtgagatatataaggtttatgcttatacttaaataggtaaactgtagcataggagatgtgctcaagtttgttggaattctacgttgttttaagaaagttgaaatttgtcagaagctactttccataaaaacaatttatagttagattgttttttgtagttagatatatctagttagatttatagttagatccataaaaatcaattgtttttatttattctttgtatttttaatgaattctgcttgacaatctttgttcaatttgccaaataagtttcctaaaacttaattttactattcaggtgcgtgtttcttagttgacttaaacagaaaatttctggtgctgtgtcactgaaaaattatttgaagaactgttgttggtatccaataatcctttgttttcccatagtttcatcagcctcataaatttgtactgattctaactgcttatgatcattatttcttagtccttgtctgattcattctgaaaactgaagctttttatgtaaggcttacccacttgaggttgccagtaaaaaccatgctaccaggagatagaaatctgtcagagaaaaactgtgcttgtagaacctaccctccatttaactactacagccttaaatatgtttgtagggcgaataaagaatataaagtgtaaaggcagcaaagaaagcattcctatcccctgggaatcttatcctagggagtagtgtgtccacttgggtacgtttatcgtccattcgccattcagtgtattactctgattgtgagtatctcaatgaccattctgataattgaagattacttctatgattcaacatagttatctcttcttaggtgaagctttcccaatttttttcatctcttgtttttgggcaccattatttccgtatctcaacatgctcttctgccctggcggtaagtagtctcctcttatctctataaagtgttttcctggagttgaactacagccccactgatgatcagaggagagaacttagggatttttggtgattattcccttctcaaactcttactgaatgtaggattaatcaacagaccctagttttagtaaacagtttctgattctgtatgctaaggcatgagtggtcctcggcgtatgtgccaatattactctgaattattgctttcaaggggataaagggcacagtctttgatgtgaggacttgattttccctttaacagtagaattttaagttttcaactgagatgaggactgttcgtttttaattcagaaagcctttgtaatggtattgctgttctctggaagcttttgattttggcttgagaaaaaatgatttaacaccttacaaaacatcagaatgagaaactgtggtcttccttctttttgttgacttttatatttacagttacgggttcacaggcttaaagctggagagggtcttgaagatattctaacccagtcacctcatcgtttagaaaacagtagccaacactgtacattcattgcttttaggtctcctcatgacttgctaagttccataagggcggggactttatttgccgtgtttactgttagtgcctccaaatgaattcaggtttacaagcaaataaatgaaatggagaacctaggacttggaaagagaaaagacttacccaagatcatcttgccaggaggaacaaaatctgacctagaaccattgaaccatcatcttgtgacaacaaaatttgtgtcttttccatgatttaaaaaaagaaaaaggacttttacttgggagtcttaatctgtattaaagatcagaatcatacacagtttatatttattagatactgtttttcagacatatacatgaatttcattgaaaagttatagtacaactctttgaatgaaggtatttttaatccatatttttatagatgaagaaacttgggctttgaaacaaaaagtaattttccaaaggctatacatagaggcagaattcaagtctggtttctacctccaagtttagtgatattttctacttttgtcttttacatggataccaatgtttgtcaatattaagaattatctagacccataagtaacaatcactgaaattatttttctagcaccttatatgttatagactttaatacctgtggatatgttaaataagtgctgcctttgcctaggggtctgtatttaaaaggcagcaaaaaaaacccatagcttctcagttcctttcatctgtggttttggccttctgtgtggtctgatttgaagggcttttctgctctttttctttttttcattttcccataattggacttggatttcctccttttggtcctaaatgatttgcaggcttcaaagcctttctactacattgcagacactgccggtatgggatgttagttgaggattaacatctgtagctggaagaaagataattgccttttttttggtttctgttgaggagtggagggaggaatgatgataaaccaggacgtgagtggaagccattgtgacatggcacatttgtctacgttctgtgaaagtaaaaagcctctgatccagtgaaattcttgtccaggctcaactgggctacttgcatagggactcagaataatctcatcacatctccactttgctgggcaaacccatctgccagccactttttggcaaaggtcatgcatgagtaataccaccatttgctattctcaaagagtcaggatttcaagagggggatggcattctgcagcattgcagttttagtgcaggataaaggatgtcgtcacaggatctactatattaccccctccatttatcagtttcctttttcacctgtggctgttctagtctttcttctagaaagatatgctagaaacattgaacttatacaattatgaccctaaaaagtagaacctctcattttttaaaaaaagagattttccttttttccctaacaatttatatattgtttacctggtaccaaatccttgtagcatttctttttgtgtaaaacatacattgagccaaaagtcataagaaaaagcagtaagtggtggttctaggttctccttcatttgttctctttctgtatttttaaaggaccctaataagatgttgtaaccaacgctgctgtccgtgatgctatagtctgcattgcacgtttcattctcttctttcttttctctccttcgttggttgaagagtcaagggcagaagatggtggtgatagggagggggcgtgtgtaggcaaggtacttcgtcccggtcatcttatctttttcctaatttcattttatattatcgtggttcacaatagtggggcttgtggtagaatatctgtgaaaaaaaaataaaaaaaaaaggaagaaatgatcacttggagttctcccatccctgcacgaacatgttgttccattcatcaggagtgtagagtctatttcccctcccgccgaagcctgggctggtttgtgtgacagaatgtggcagaagtggtgctgttgtaacggcaggccttaagaggcctggcagtttcggagccaccatgtaaggaaggaagctcaagatatcctgctggagggagaagccatgtgtaggagcatcaaggtgctccagcttgcagctggcaccatgctcatacattggactggggcatcttggatcctccagccccaggtcagctcggccattagcacatggggttgagacatcctgttctcactgagttctgccccagactgcacttgtgcagaatctctagcaaatgaactgatgatgatttaaagcccctcgcttttggggtagcttgttacagagcaatagattactgagacaggatttgtagcttcctaatcttccttcttttctcatatctgtttacggtgtgtccagatagttctatgactccgtatgtccatctacaatcagtattttgttttagtacgagttcgttaggcattcttcagtcgctatttcttgctttgtagttagtgggtttttttttcgggggggaggagggttgtttttttaccagctttatatttgtcctcacttgaagcaggtgactctcctgaaatgctcctagggggacatttctctgaggggcacagtgataccattttcttctagttgtatatgagagacagaaaattacttgtctctctcaaaagaaaaacagtggaaaaaagatgacttattttccctaaagaatatttcctgctacccattaaaccatagtgacctctcagactcctcaaatagctgtgcatcctactcactgatgggcagaaaacaaagcagaaggatctagggtaaacatttttatttaaaagcaaagacccagacactccaaggagagtttgcaatgtgtattttctgttcaaatggcaagtgttcccaggaaaacctggaaggtagttacctagttttattttagattttctggaaggatctgaaaccctttttaaaagtacaacttttaatttcctgagtagaacacatgactgttctgagtcctggtttcagtttctataagcaatttcctttgagcacacaaggtagtatttttctcatttcgttgtcagttttttgtacttaaaagatttattgtttctcctgttgtctttctgcctagcaattcctttcctcaagctgtcctaaacagttgattaaaaaagaattactgagatcatgtttgatacagggcagtaaattttaagtatcaaatagataaaagaggaagggtatagagaatctaagttgcctttcttaattggcagaatcttccaatgtcactttcatgatttgtttgctgtttccatccttctggtctttattttttaacactgactccatgagtgcattagtccatagtcagaataaatgttttgctatgtgatgaagaaggttttttgttttttgtttttgagacagagtttcactcttgtcacccaggcaagagtgcagtggtgcaatctctgctcactgcaacctccgcttcccgggttcaagcgattctcctgcctcaggctcccgagtagctgggatttcagctgcccgcccccacgtccagctaatttttgtatttttattagagacagggttttaccatgttggccaggctggtgaagagtgtttattttgtgggggaggtaaaggggtgaattttctagagaggacagattggaatgacttttagaaagaaattatctttttaaagttttatttaaaaataaacattactttcgaccttagctaggtacatgtgattttttttttggtagccatcttgccaactctaaaatgttattatcggctatttatttgttcagtgttttcatatattttaagtacacacatcttgtctttcagttatatcttaaatttctgaaaaacagtgcccacagaatcttaaactctaagacaaggcttcccaaaggacatctggcaatgtttggagatctatttggttgttacagctgaggcaattagctgctactggtattttaagggatagaagccaaaaatatgtgtaaacagtgtatagcgtacagtatctggcacatagaaagtgatcaataaatactttttgagtggatggatgaaaggccagtgaatgtaacaatggatatagtgtatcttttctttatctttcctcagaggtactaagggtcaacttcgttaaagatcagattgctagttcaactataaggcatggtcatctcattaatatttatatataaagggtttttgtatttcctccacaatgacaagtcaaagctagataatgttttagttataacgtggggtgtatatgtttgtttatattggagaatacttaccgcttgtcagctggagaaggagacattttacatattagcagatgagatttggtagcagtgttgatgattgtgctgtggtaccttcatacctagaaggtcaggtcctcattttattgttgtgtgattgtggaataaatgcagattttttagagctgtcccacggaaacatttcatagtcaaaatatctcaaaagaagtggtgccttgggaaaaacacagcatattacttgtcattagaaagaggcaatacttgagcatatttcttatttttgaaagtcagtagctagtatcccgtatgatattcctgtttcaaaaatgaggaagctttttttgctttatgatgctttcttccttttccagtctttatggaatgtaggctttgctattctaattaaaatggaaataaatgaatgtgataaataagagtttttactgggtagaaatgtttagtgcattgtagcaacgttggtaagagaaattgaattagtaatttcctcagtggaaggtttagcatgaggatttatttccttctcctgtgtagtaggctcaagatagggatgtgaaggattttcctccagaatggcatttgtaatttctcacagtggcctcatttcattcatggcccagagagagtgcaagctatttagagaaagaagagtttttgaaggtaatacatgagacagatgttgggtatcttttcttgatatacaattactaaaaattatccagttaaaatctataccttacataggaacctgcactgtacccttttttgtcttaggagctttgacttttgtttattcgttttatggttgttgcatgctacttttatttaatgtggtggcatgttcttaggagaactgcataagtctagatacagccctcttcatcttgaaataattttgggtaagaaccttacacaaggtcccacatttgacttgaacttggtattgagtatggactaatgttagacactgctgtgggttaaaggagtcagttaatctgatgcaacagagaaattgaaatcagaaccacttagagctgtttccttagctcattgcttaagcttttacagaatgcataattatgaaaatttataggtttgtggattgtgggggacgtgtggttcagaaatctctactgactagttcagagtctcaaaggggaagaaaattgaaagggacataaggttcttatagttgatgaagtctctagcgttaaaaattgcttattagtctctgttagttgttaaattttacagctgttctttttctttgggtgggaaaggtgcaggaagaatcaaagttttcaaatcaacaggttttcttgtgaattccacattttttgaacagacattttgagatacagagaaagcctgaaaccagatctctgcttttcttaaaagaaatcttccagaataactgagaagcagaactgacatgtgaggcgtccaccctctctgtccccttccccttcccagcttccctttcatattcattttcatagcttttttttcaaaagttttatatttttcaaaattgacatataaaggttatatttgtcatgtacaacatgttttgaaatctgtatacattttggaatggctaaatcgagctaattaacttatgcatgacttcacataactcacatttttagctcacgcagcgtaactcaaggtgactgcttggcccttgaaagtctggtccttgcccaccccagcagctttggctctttgctgcccatgtactccagaaccactgaacttccttcaattcccaaacacttttcctaaacactctgtcttgcctctaagtctccatccatgctgtttcctctgcctgaaacactcctccctcctttttgtctgggtaactcatactcacccttcaagtcttccgttagctgtcccttcctctgagaagccttccctgtcatcaaagtctaagtgttctttctatgtgcacctgtggtagctggtttttaattgactttgttgaatgtttctatgagactataagtttggagaaggcataaaccatgtctgtgctgtgcagagtttggtggataggaggttctcaacttttcattgaattcttgcaatgagtatttcagtgctcaattgtacggtgcagaaattccatggaaaatcagagaagagagaaatcagtgaaggctgaagtgatgagtgaaagtgggacttgacctgaacctataatgataaactcctttgtgaagtttaacactctctcttctacttccctttctccgcttttttttttctgtttttcataaaatcattcattcattcagcaaatatttaagggtccagtcttcaggcattgatctaggtggtgaagatataacagtgaaaaatccctgccctcatggaatatgtgttctaatagactaaatggataaaaatgggttaaatataagtctagaaagtagcttagtagactagtagggcaatgaggaggccaactcgatgggtgggatatgttacaaacttggactttgaatggttttccttaagagcataattttacttgggagagtaggtgggtaatagggaagtataaataacttctgagcaaaagagacttttcgtctgtaactggtatgcagacactgaaagtaaaaagtccagcttagacaggactgccaaaatatgggtaatgatagccagcctggaatagtgtagtaggggagggttgtggcagagaggtaaagatgaataagaggggtgtgtgtgtgcgtgcgtgtgtgtgtgtgtgtgtgtgtgtgtgtgtgtttggatttttttttaatttagctattgattgattgatcgattgagatggaatcttgctctgttacccaggctgcagtgcagtggcacaatcgtggcttactgcagcctccacctcccaggctcaaggagttctccctgcctcagcttcccaagtagctgcgattacaggtgtccaccaccatgcctggctcatttttttttttttttttttttttttgagacacagtcttgcggtttcctgggctggagtgcagtagtgcgatctcggctcactgcaacctccgcctcccaggttcaatcgattctcctgcctcagcttctagagtagctgggattacaggtgcccaccaccatgcccaggtagttttttgtatttttagtagagatggggcttcaccatgttggccaagctggtcttgaatacctgtcctcatggttcacccacttcggcctcccaaagttctgggattacaggcgtgagccactgcgcctggcctgcctggacgatttttatatttttagtagagatggggttttgtcatgttgaccaggctggtctagaactcctgacttcaggtgatcctcctgcctctgcctcccaaagtgcaagtgctgggattacaggcatgagccaccgcacccagcctagcaatttattttctaaagaaaatttcctagatggtggactgtctggatagtggaaataaaggacagggatgagttaagactatctaaagttagagccccgaagcgtggttggaacattaagatagtagttttggtttagttggaatgaaggtattttgcataagctgaatctgagatttcattagacctaggttcattcagttgatacctattaagcatgttctaggggttataaagatgcaacagaacagacatcgagttcatgttctaatagactctgagatgagaagatagaattgtttggaaatctttcgccatgagcatgaattaaagtcatgggaatggatggagatttgggcctagttctaggtagcagataatcctgtagtttatttaaacctctatatttagggtttgatataataacgtaatgattataatcagctatacagcagttgatattaaaataaggatacaagagaatattggggaattacagtggatcttttaagcagctatgttccttttctgtatgtggaagacgataaaagacatttctttgtctttaaattctaagctgttatttcattaaagttcagtaacttaatgtctctggctgcttattacttggcaatatctcactagctcatcgatgtcagtgtaggctggtctacaataaatgcataaaagaaacagaggccagtgattcatatgatttttaaacagatttggcacaggagtgcctttctgggtttagggaagtggtggacaaggcaggagagaaccacattcatcttctcctcttgtgtttgtcttctgtctttcaataacgtccatgaactgtgaggttagtgtcttggctgagagataagtatggcttggcattgattcttctgttgttacctcaagctgttttctagtccccaagaacagcactctcagtgggtgtggaagtgggcgggacatgaagcaatggttttacattgcattgcctggctacagcttggcatttctttcctttttctttttctttgcgtcattgccattggtgccactaattttgcttcccctctcttttataacttgtttcttcgggagttgcctagagtctctgcattatatcttatttggtattgaggcagtgtgttcttggccaataacctaggagatgatatctgttcatcttacaggtttagtgctggaggaattcattaaaaataataataaaacaaaaaggaaaaataaaagttcctttcagtgggtcttcttcttcctgtccctggctgtcctttactttgggacatgtactgactccattttagatgtccccgtctctcaaaagaggggaaagtggaacatgaggtgggagggtgatagaaaagaatgccaagcccattgtccccagtggttccagaaatcaaaagctagcccgcttgaaggaagtataatggatttctcccctttaggacaaagtgggattggaatactttgtttttcatctttcttctgaccccaaccaaggaaatctataatattcagttctttgaagatctgatcctacttatattttctccttttgatatttctgtcccttgtctgtttgtagcccctcttccaaaagctgactgcaggaaaagagaaagattactattttctaagtttcctaaaaaataaaagagttcttggggggcttgcgtcgcgttagacctaaaggatggatagaatttgggtggattggagtagaggcttactccaggcatgggttacataggaaatatgatggggagccaatacgtagaacctgtttgctgcactgaaaactttaatggaagtttatttggtagaaaagaacaaggaaattagatttgctcaatgattcccaacatggtagaattctgttcactttgtcttttaaaatccttttacatgacttttctttttctttcttttctgagccactaattttgcctaagcccacctgcccattccacatctcccattgttcccatctagttgttacgattgttctttgaccacatatttctccttatatccagggacgcagactgttagttagttatatgttatttccttgctgcttttattcatgccttcatttatttttccatttattaataagcttatttgttcttgaatcatttgttaagcccatgtatctttctcaaatgaggaattacgtgcccacattaactctctacacttcccccgccaggtccccaccagcagaaagaattattttatttttatttttatttttatttattttttttagagacagggtctcactctgtcacccaggctggagtacaatggagtgatcatagctcactgcagcctcagactctgggctcaagtgatcctcctgcctcagcttcttctcaagtagctgggattacaggttcacaccaccacacagctcatgttttattttctgttgagatgggggtctcgctatgttgcccaggctggctttgaactcctggccacaagagatgctcctgccctgacctaccaaaatgctgggattacaagcatgagccaccacacctggcccaacagtaagaactctaaggagatttctggctttaatattactgctatttgttttgcccaatatgattttgcctcatttttcttcttccatttatagaccgctgtaatagccttggtgacaggcattacccctctactcgtcctgatgctgagatctctaatccacatgattcttccacccctacctgcttataaagaatccaaaccctaggctcatattttcatcttctttttagtattttcattcttcttatgtctattatcattaaccctcaaaagaataattttctgtataactgtagacatgtaagtttacagatctttacttgagttcatatggctgtgatagtgtttcactgctgtgactactggaagcttccttaggtattccattgtgtatggaaacggaagttgccaatcacattaaattaatttctgcctcaggaaacatgagagatttaaaatcaataaatgatttttcagtgacactgtcagggaaaatcaaatcttctagaaatttaagtcagaattaaaaatgtgttcttaaaatgtatttatttttatgtacttggctttcatatgatagtttattttaaaaaggctaccgtactttgctatgtttatacttaccagtgtcattaatctgtaaacagtgcagtgccactgacatattctttgaaccattagtgtatggaaggcctcgggagagatggtactggagatacagaaggaacagggtttttttcccccacctcaaaatagaaagggaactctgtcatatgtctttttgtatttctttcaggatgtcgctctgtgctaagcatttaattgatcttcagtagagaaacgcctaaggaactaacttagattatattaaaatagctactgaagatctttttaatgactttctataaaatgagaaagtgcactggatgatgaatgcaaaaatgaaagaaaaattaaatccatatatgcacaaaggcatttgcagagtttgcatgacagctcattcctaagtattacttatggcacttagctttctatgcagagagtaacaataacagtaatattgatcgttacacctgggcttttcaaacaagctagaacacacgtgtcatctgcagccacatgtccttcatgtgctcctgggttcatgcactgcccacggaggaaatactgtgggtcactcttaagaggcatgagttttgctgtgtcaattcaacggagcatggtttgtttgttcgtttgtttctttgtttttctcaagcacctgtttgtccatttgcatgccagtattatggaaaacattttaaaagtatgagttatgttgcatgttcttcatcttaatggtttaaatagggaaacaaaactgataacatgtaaaacagctagcaagggacatacggcattctataattgttgctcattgtggggttcgcataacgggtgctgaaatagttcagaaaattagagtttggagggcatattgtactccagtaatgctccttgggagtgatagaatttgaatgggctctatagatagatgagatttaggcagatggaagggggcgctggtcagaggcagcctcagggcatcccaggccgaagaggtcagtatgcttttctccctcatccattattgcttcttctttctcctcctacttggtttcagtcttttggaaatgagattgacatctttctctaatgattatatttagatacatttattcacatctgtacttccttcaggtggaaatgaagggggaggaaatggagagaaagaattaatgttttccattttttaaagattaagtttattcttagtgtggattacgtattactcacttgaagggaaaccttttacaaggccatctagataagagaaatctcagattatcaactgtgattagtgttttcaactgcactggaaacagaacatataagaacatggatatttttagattctgatttaactcttttattctatttgccagctctaaaaagtagactgagcaaaggtaagggtgagtgctgctgctttaaaaaagggaacaaccagcttcttgtctagttagggaatctcttaagactctgtcacatacattttagtcccactgacatattactcccacctccttgtgggtagtaaagttaaaatgttttaaatgttctttgatcgtccacccaccgatctagtagacttttaagttcaataccgcagctgggagaaaggggagttgaaattcaatttttactgttaaaaacaaggctcaacaatcatagtctgtatgtctgcaccagtttagaaattgtaacaataaattggcttccgctttcaaatgtgttgttagtcatcacactttaaattacgtggcattactatgtgtgacctacttaaaaatggttgtcccttcagtgggaacaatatgtgtgcagccattgggtgtctcgtaggccttttaaaaagctcacttttaatgcaacacattttgaacatcaacacattaaataaatacttactatgattctttactggctggattttattgggtaaagaagtgtgatcagtctttagggaacgatttagtaaacagttacactagcaaatgcctccctcttgccctgtgttaataggacacatattccagaatgatcatcggtttatgcagtatggttcctggaacaggagtccaaagacccaggcccatctctggtcttgttgttacacagcttcatggccttgagcatgtcacctaaccttatacaatatcaccttcctcatgtataaaatgagacattgcattattgtctcaataaacgtcaatctttttaacttctaaggctttaatggtcccagctatgctatagaacttcaaggaaaaacaaaaggataaatacagcagttcctggtcttgggtggctcaagcacttggtcctagttacttgggatacagttagttcattctgatagacatttgtaggcatgtctcaaaatgagtcttacatagcacccctgggtgccttccccacccctttggagcctgtattggaacattggcaggttttttttttttaatgaaataatccttaaagagaaatcagtgattgataaaacagtatcagaaattgcacacaccttgttttgctagccagaagtgagttttcaggggtgtccggtgggacagatggcgatgacatgaatcactagggctcttcgggtgagaagggcctttgctccgagtgggatgtggattgtgggcttttctgcagagacttctttccccaagaaaaccagtagaatgctagtgatgtaaactccttgttcacattgacagatgaacctttctcctcagtatgaatttttttcttcatcttgtcttttttaaatagaggcttgtttttgccctcagatcctggggtttgggagagagtgatatcaaataggaaaaaataaaacctttaaggcatcactacaaataataaatcactgctttggaatgtgaccctttaacctcattttattttcctgaagacttggattgttgtaattatgtgtgtgtttaaaacgcactgagcaaatgcatcggcgctcctgtgactggtattgtatgccatctgcagagcactgtgggggtggccaggcagggaggatgggtttgtactaaacactggatttttcttttaattttactggcacattcagtatgtacttctgtaagaatcaattttcatttcactttttggtcattttgcatgtattttgtatttatgtcccactcaagatcttctaattcttgccaattgttaattgctgtaaacacatataattccaggtagtctgaggatatggatagaggtttgcttttgttgttgtttttaactctggtttcttagattgctcatccttgacttaataaaattatacccttttcctagatattttattaaaatgtgttgtcaatccaaagagtcaccttaagaggctcagagaatccaattgtggtaaaatgtgtaatccagtaaacatctggtggttcatgttgccaggaatgattggaatgtgcctggtactttaatgaccattttaataaaatatggttatgtttttggattcaaagcaggagctttgagggttttttgtttttttgtttttgttttccaacttctctgcttgcaagggaatatctgcagattttctctacatatatgagtttcccatacattggaaatggcagtagtccctaatgagttgggtcagaatggggcagtcataactgcccatggaattctattttacattttagggcattaagggcaagaaaacttacgtatctttacctttttgggtttcgatatgagaaatatgatgcatatatcgctatgaacagaagaggcctggttggtattctttaatccttcgtgtttatagagcctgatatacaaaagaactattgtctaaaaaatctttgacaaagcaaaatatacagagttttgctatctagatatatgctatattcctacagagctttctggttaaaatgaaaccagctctaaagaatagatttaggtaacttgaagattaaaaataaaataaactagaataaacaagtcaggctttctcaaagttggaggtgtccatgaatagatcatactatctcgggaaatagtgggttccttgacctgcaaatgttcaagaatagttgtgcaattaggatgttgaacaaggggctcagctaaacgagtaaatgagtatttggagtaaatgatttttaaagtcttgttcaagtgagattctatagtatctgttttgatacagttttatacaaatatgaatattgttttaaagcagtatgactagtagcacataataaagataatgtccttgacctgtcttttgcttctgccagggttgtgtatgtggcttgagaaaattctttttctctggagttctctaaaacatggaataaagcaaaagtctggatttagtagtttgtacaagccataaactcagtttcagatttttaaaatttcagttaaaaagtcaaggtcagaatgcagtcttgtttagaggaactctgtgtattgtacccaggaaacttttcactttgacaatctcagtggcgtccactcatacccatcttccagggtgccttctagacactcgtttattggccaaacagagcagagcgcttctgaagcaggctgcgggactatccgaagtcacagccacctaattttcgatctctgtcttagctttttccttttagcctcattctcctgatctaggataactctgttatcacttacattctttaatgctttattcccacaagatctctacatcagctggttgacagctccacagataattgtagcagtcaagtggagactgaaggtctgtgatgtctttttttgaatgttgtcttggcttttgtgctgaactctgctctccccattgcctcctttttgtaaaacctgattttcccattttagtttaggtggggtttttttgcaccaaacgactttcaaactcattattaatgtctctaaattataaaatttccttgacctcctactctcttctgtcatcatttcctgtttttcttgtaccatatgtcatctcctaaaggtttttagcggttttcttcagattatatgacatttcgggtcttaggagagtgctatgttcaaaagcacagctaatacatgaatacatgtgatactttttgttaatattcttctgattataaaatgtattaaacatttgttttagcaaatctgtaaagttttaaaaatgcatcagtattcccaaagctgagataactgtgtttgaatattcccttctagtcctgtatatctgtctatgaagctaaatgatctaacctctttgtaatccctgtctctgcctacttcactgcaagaacaaacaaaccaaagcacacacataataatatgctaaagctacaaatcttcttttataattccctatggggaaaagtaaagttaatttgagcatgtaatggataacatgggaaaataggtaaatattgctgtgattctagatgaatgtagatgaatagaggaattaataaaataaaagattgtgagggtagaagactattacatacaaggtaaccttgttgagggtgttgttttaggaaatggcgacagggtaggggtgtggcagctgctccaggaggtaagatacagtcagagcttcaagggctcactagggcagggtgaaactaattccatttctgccgaatgtgcttgaagaaagactgttaaacccttggacagaagtgggaggcaatacacaagcacatgagtcccagaggcaggccgctgggtgccgtcttggaagctggccatcaccagtcccactgagccagcttcagcatttagtctaatcctatggagcattttttgtgttctatttaccaagtctcaccgcagagaatttaatgttcgtaagggagctagagcaggcaaaagtttatgaaatacaaagaaaatgaatagttcagatttatgtgtgaaaagaattacaaggcaggctgtatggagagaaggcaaagggaatattttgttttgcttttttatctttctaactgagtcaaaaagtcaggagttgactcaagtggttatagtgtgacccttcatcaaagccagtattgtggctgctttggagaaagtaaaagaaattaaatttaacatacaaacatataaaatatataatataacaaatttgtttaaaattgattccctttctgcaattttgcttcatggttggtttttttttaactggagcaaaatatgttttggctcaaaagcttgcaacattaacattgtataaagaaaagcaaattagaacattcagaccacatttataatgggtgacctcataacagtaataaatgctcctggcagaagcataatagttgctaaactaggcatgtacttatagcaagaactcctcactcccattctggaacaatttttaaattgaccttttcttttaagtggttctgctccttaagaaagtggcccgttgcaaatggatgttagtataaaatggttactttttgaaaaaaaaattaaaataaacgtaatttggttaattttatttttatttcattctcttgtttgagtttgaaatgttttggctttaggttgcatattggagacgggaacaaaaaaacctttaagactgtttaaaataggttgattttagtgctggaagctaatttcgtttttgtttctaactaggaagaatctcaggattttaagtccagaggtctgagttttgttttttagaaaaaaacttacccttgattaaccacatcttcctggagcctggcaagaggtgggtgtccaggcttgggcctgctacctttggctactcctcttggtcttagagaaggtagagatgatcatgctcacacatgtgctgtatccgtgagggagttatagattgagaaatattaccttttaggccttttttaattgaaaaagttactccatagaagatcaaatgaagtcactttaaaattgtacatttttaagctattgatgtaaatcaagcatggagaacagtttatagaactacaatggtctattaagaaaggttattcagaacatgttattcctctgcttaaaatcctcatcctataacatccttctacacttaggaaaatacatttagactccttatcaaagcttgcaagacttacttgaactgggtcttgaataccctccctgcctcatctctcattatttcctctcccactgcccaagcttcagccaccctggccatcttgctgctgtgtgaatacaccaagctcattcccactctcagccttttgtttcacccacctggaacacttcctttcattggctcctcattaatcaggggcctgcaagaatgttgtgttttcatagaggcatttttccatttattccactgcagagcccggaaaggtaaaaactatatttccctctcctcttgctgctcaggttctggttgtggtttgatgccaccgtcagacacaccatatgaggtgtgtaaggtgagtgtggaccatgagtggtaagtatggatgtgggcgtgtttcgtagacattcagccttgaagtttttctttgacctttccagcaatcaactgtttaatacctgataaatcatgttttaagctagctaactagattttgttctctgcactcatggcctgaccaacaattgggccatggccatcctctttgaaatagcactcacccactcctgccgttatgctctgtcctcttaccctacttttgttcgttaaagcacccagagcaacctgaagcaaccaatgtatttgcttattcctttgttagccagctccctcactcaaatctatgttctatgaagttagatgctttgcatttttactgctgtgtctgtctctacctagaacaatgcctgtcacatagtagggactcagtaaatatgcgttggatgtacttatttgctacagttttttggtagctgcctggagggttggagtaagaagaaattgcagattgcaatggggttcaagaaatgagcagtattattagtaagtggtgtttgccatgggttctagagcagcagagccctgttgctatgcctgccatagattataacaactgaggtagagcattgatgcctgtgtttgggaaacacttccaagcgattttgcttttttaaaaattatgttttatttagctccagagacaaaatctaaagccttctagtctgtaggaaaaacattccattttaaaatttctgtcagtttataagtcattaagttagagtttgtagagcacttactctttaataatttgaatgaggataattcaaggaatagcaaaatattggctttcctgaaagtgttgaattacatacatggatacattaataatatgtttcttagatctgcttaatctaggtcaatgcttttcaaagtgtagattgtaacctattaatgggtcattatgttaatttagtggtttgtgactagcatgtttttttcttttaattttacatgtgcaggatgtgcaggtttgttacatgggtaaacgtgtgccatggtggttagctgcacctatcaacccatcacctaagtattaagcccagcctgcattagctatttttcctgatgttctccgtcttcccaccccctacaaggcccagtgtgtgttgtttccctccctgtgtccacgggttctccttgttcatctcccacttatgagtgagaacatgcagtgtttggttttcttttcctgcattagtttgctgaggatgatggcttccagatctatccatgtccctgcaaaagaaatgatctcattcctttttatggctgcatagtattctatggtgtatatgtgccacgttttctgtatgcagtctatcactgatggacatttgggttgattccatgtctttgatattgtgaatagcactccagtgaacatacacgtgcatgtgtctttataacagaataatttatattcctttgggtatatacccagtaatgggattgctagattaaattgtatttctggttctaggtctttgaggaattgccacactgtcttctacaatggttgaaccaacttacattcctaccagcagcgtaaaagcgttgctgtttttccaaagcctcaccagcatctgttgtttcttgactttgcaataatcaccattctgactggtgtgaaatggtatctcattgtggttttgatttgcatttctctaatgactagcgatattgagggtttttttcataagtttcttggctgcacgtatgacttttgagaagtatctgttcatgtcctttgcctgctttttgatggggttgtttggttttttttttttttcttgtaaatttaagttccttgtagtctctggatatcagacctttgtcaaacggatgtttcaaacattttttcccattctgtgggttgaatgtttgctgtgatgatagtttcttttgctgtgaagaagctctttagtttaattagatttcatttgtcaatttttacttttgttgcagttgcttttgacattttcatcataaaatctttgcccatgcgtatgtcctgaatggtattgcctagattttcttctagtttttccagttttgggttttacatttaagtctttaatccatcttgagttaatttttgtataaggtataaggaaggggtacagtttcaattttatgcatatggctagccagttttcacaacactatttattaaatagggaatcatttccccattgcctgcttttgtcaggtttgttgacgatcagatggttgtaaatgtgtagtcttatttctgagttctctttctgttccattggtctatgtgtctgttttttgtaccagtaccatactgttttggttactgtagacttgtagtatagtttgaattcaggtagtgggatttctccaggtttgttctttttgcttaggattgtcttggctgtacagactctttttcggttccatatgaattttaaaatgatgttttctaattctgtgaagaatgccaatggtagtttgattggaataacattgaatgtataaattattttgggcagtatggccgttttcatgatactgatccttactatccatgagcatagaacgttttttcatttgtttgcatcatctgatttccttgggcagaggtttgtcgttctccttgaagaggtcgttcacttcccttgtttgccatattcctaggtattttattctctttgtagcaattgtgaatgggagttcattcatgatttggctctctgcttgtctgttgttggtgtataggaatgcttatcatttttgcacattgattttgtatcctgagacattgctgaagtgacttatcaggtaaagaagcttttcagctgagataatggtgttttctagatataggtttatatcatctgcaaacaaagacaatttgacttctcttcctatttgaataccctttatttctttctcttgcctgatttccttggccagaatgtctaatactgtgttgaatacgagtggtgaaagagggcatccttgtcttgtgccggttttcaaggggtgtgcttcctgcttttgcccattcagtatgatactggctgtgggtttgtcatgaatggcttttattgttttgaggtacgttccttcaatacctagtttattcagaatttttaacatgaagggatattgaattttatcaaaggtctttttggtatctatcgagataatcccgtggtttttgtctggagttctgtgtatgtgatgaattacattaactgatttgcatatgttgaacccgccttgcattccagggatgaagccaacttcatcatggtggataagtttttcaatgtgcttcgggatgcagtttgccagcatttattgaggatttttgcactggtgttcaccacgtatgttggtttgaagttttcttttttttgttatatctctgccaggttttgatatcaggatgatgctggcctcataacgcgagtaagggaggagttcttccttttcaattttttggaatagtttcgcatgaaatggtactagctcctgtttgtacctgtggtagaattcagctgtaatgcatctggtcctgggcttttttgtttgtttggttgggaggctatttattactgcctcaatatcagaactcaatattggtctgttcagggattcaaccacttcctgattcagtcttgggaaggtgtatgtgtgtatgtgtctaggaatatatccatttcttctagattttctagtttatttgcatacaggtgtttatggtattctctgatggttgtttatatttctgtggggtcagggatgatacccctttatcatttttattgtgtgtattcaattattttttcttctttattgttctagctagtggttcatctattaattttttcaaaaaaccagctctgggattcattgattttttttttttggaaggatttttcatgtccctatctccttcagttctgcgctgattttagtcatatcttgtcttctgcgggctttgaggtttgtttgctcttggttctctagttcttttagttgtgatgttaggttgttgatgtgaggtctttgtagctttttgctgtgggcatttagtactgtaaatgtccctcttaacattgctttagctgtgtcccagagattctggtacattgtctttgttctcattagtttcagagaacttcgtaatttctgccttaatttcattatttactcaggagtcattcagaagcaggttgttcaatttccatgtagttgtgtggttttatatgggtttcttaatcttgatttctgattggatcactctgtggtccgagagactattatgatttcagttattttgcatttgctgaggagtgttttacttccaattatgtgatcaattttagagtaagtaccatgtggtgataaaaagaatgtgtattctgttgtttcggggtggaaggttctgtagatacctgtcaggtctgcttgatccagagctgatttcaggttctgagtatctttgttaattttctctcttgacgatctgtctgatattgtcaatggggtgttaacatctcccattatcattgtgtgggagtctaagtctctttgtaggtctgttaagaacttgctttatgaatctggatgctcctgtattaggtgcatatgtatttgggatagttagctcttcgtgttgaattgcatcctttaccgttatgtgaggcacttctttgtatttttttatctttgttcatttaaagtctgttttgtcaaaactatgattgtgacccctgctgttttctgttttccatgtgcttttcctccctccatttattttgagcctattgtgtctttgcgtgtgagatgggtctcttgaagacagcacagcaatgggttttgactctttctccagctttccattctgtgtcttttaattgaggcatttagcccatttacatttaaggttcatattgttatgtgtgaatttgatcctgtcatcatgatgctggctggttattttacagacttgttaatgtagttgcttcatagtgttattggtctgtgtacttcagtatgtttttgtagtggctggtaaccattttccctttccatattcagtgcttcttacaggagttcttgcaaggcaggtctggtggtgatgaattctgtcatcatttgcttgtctgaaaaagattttatttccccttcactcacaaagcttagtttggccagatattaaattctaggtcggaaattcttttttttaagaatgttgagaccaggcgcagtggctcatgcctgtaatcccagaactttgggaggccgagttgggcagatcacctgaggccaggagttcaagaccagcctggtccaatatggtgaaacccaatctctactaaaaatacaaaaattagctaggtgtggtggcaggcacctgtaatcccagctactcaggaagctgaggcagaagaatcacttgaacctgggagttggacgttgcagtgagcctaaatcacgccactgcactccagccttggcgacagagagagactccatctcaaaaaaaaaaattgaatattggcccccaatctcttctggctcgtaaggtttctgctgagaggtccactgttagtctcatgggcttccctttgtaagtgacctggcctttttccctggctccctttaagattttttcttttatttcaacctttgctgaagattaggtatcttagagttgttcttctcatggagtatcttactgtggttctctgggtttcctcaatgtgaatatttgcctgtcttgctaggttggggaagttctcctggatgacatcttggagtatgttttccaacctggttctgttccccctgtctctttcaggtaccccaatcagtcgtaggttttgtctttttacataatctcatagttttcgaaggttttgttcattccttctcattttttttccctctaatcttttctgcctgtcttacttcagcaacatagtcttcacctctgagattctctcctccacatggtctgtttggctattgatactcatggttgcgttgtgaagttctcgtgttgtgtgtttcagctccatgaggtcatttatgttcctctctaaacgggttattctggttaacaggtcctgtagtgtttcatcatggtttttagccgctttgaattgggttagaacccactcctttagctcagcaaagcttgttattaccaccttgtgaagcttacttctatcacttcatctgtctcaggctcagtccagttctgtgcccttgctggagaggtggtgcaatcatttggaggagaagaggcaccctatttctttttaattttcagtgttttttctttgattctttctaatctttgtgagcttatttaccttggatctttgaggctgctggcctttggctggggtttttgtggtgtcttttttgttattgttgttgttgctttctgtttttcttttaatagttaggtccctcttccatagggctgctgtggtttctggggttccactccacaccctattcacctgggtacctcccatacctggaggtatcaccaggggagtctgcagaacagcaaagatggttgcctgtttgtttctctgggaactctgtcctagagggacactgacctgatgctagccagaactctgctgtatgaggtgtctgatgacttctgttgggaggtttcacctagtcagggggcacaggatcagggaccctcttgaagaagcagcctggctgccccttggcagaacaggtgcagtgggctgaggggattcccacttttctgagctgaccagactcctcagagccagcaggcgggagagattaaatctgctgaaccagagacagtggccgcccctcccgtcaggggctccatcccagggatcaagagttttatcctaaatccctggctggagttgctggaattcatgtggggagaccctgcccagtgaggagggatggatcaggtcccacctaaagaagtcagcccatgatctgccacagtcgctgtgcttcactgtggggaattcctcctggtctaaactgcccagtctccctggcatcagcaggagaaaacggccaattggagccacagtgatggcagccacccctttccccaagaacttggtcatcttagtctccagcctgctaccgctgtccacaacccgagcagctgctgagagtctgcacagctctgtgcatgggacccaaggccctggtagcgtgggttcacaaggggatctcctgatccgcaggttgcatagatacttggaaaaagcgtggtttccctggtggggtagtatgatcactctccacctcccttgactggaggtgggagttcctcttaccccgtgtggctctcaggttggccattgttctaccctgctttttcttgctctccatgggtcacgccaaccacctcattagtcccagtgagataatccggatccctcagctgaaggtgcaggattcactcactgtttttgttcctctgggtgggagccacagaggagagctgcttctagtaggccatcttgacctctttcttgactagcatttcttttattaaaatgcagtagaaaatagagggtattatgcatatttgcatcttttatgtactgggtcatgacgaaaatgttgtctgttacagaaggttagagtaaaaacttttggaaaaacacggagagacagctgtgtggtctgtaacttataagtgatggctctactcagaggtactgctaagactgaaagttagaaatttttctgtggaaaaaaaaaattttctaatttttttttcaatcccaggcctagagctgccatgaggtgctatattcagtattcacataggtggaaagtggagagagagcagttaatcacccttgtattgagctaggtgctttaccacagtctcttatttggcccttccatacaatgtagaggaattactgttactctcatccctaaatcctaagaaagaaaaggaaggtttttctgttgtctttatccttatatcctctttgccatatgtgtaaagaaggaagaaagagtaagtctgaggtttaaagtgagccccattaaaactgtaaattagtcaggattcctctgtctgttttccctttctcccctgtctccaggatcagactgggtacctctgccgagattgtgaataaatattctttacataattggccaacatttctttaaaagcaaggtggtttattacctggtacaagagcagagaaggaaatgtaggtggcattgcctaatctttcctctgttgccctgagcaattcagctctagccccaaactttgatgtcctacttggccacatactgcagtcattgtgacctgtcttctgtggaagacatcagtatctgtctgtttgattcaggctttcctttttgcgtctcttacttcccatcccaaacttttccatctcagactgtactcttcggggaagaagtataagaatttcttcctagcttactatgtttctaatgagccttattttattataatgagctaaaattggcaggaggtaacaaacatgggccctgaatcccagccgtaccacttctgacctcaagagtgttatcagtcatatgagctttgctgtctcatctggaacatgggagtgatgataatatctatctcatagtcttgcactttttgtttttataagatcattgattaaaaagtattcagaactgcctggcagtagtagcaagtgtgtgtgttgtggggctgtcaactgtaaatcccaatcctccaatctgccaagataagtaggataagccctgccctgaagctgttggattaatttagtcagaaatcaatttcatgaacacttcttgagaatctgctacttacctgttgctgtgggctgtgtatagaaaacttcaaggagctgatattcatctagaaaagtctcatagacttgacacaggagcagagcagtataaaggggtagtgctgctgttgtgaattgtcgggtaggttttctggaaaggggaagagggtgagctttgaggcgtttttgaaggatgggtaggatttggacaggcagagaagaatatgcaaaatcagcacaacgagagagtgagtatatgatgtgtatacatgtgtggagtggcagctgaatgggaataagcgtaataggaacatggaattgcaaatgagaagtagtcaagattgcattggatagaatgcagtatggaaaatcctgatttcctaaatgagaatttgacttagtagtcaagaatctttgcctatttcttccctcattcccttataaaaattaaatttaaatgccagtttattaatttaaataaatgctgtctaagctggtttaaccaggacattctttcctaataggtaactaagaaaccatataatatggtatactcagaaggttgcttagctggtgtggcatcaggacaaaggaagctagaggtggtgactgtttaatgtcatgaagcttaggcagcttgatgtagccatttccagtgaggatgtgtttgccaaaggtccacaaacctcacagttcattagatgcagcttctatatccatctccttgctaggtgattgccagctggatgaaaaatatatccaagcccattagctaaggctttttctcccctggattgtgcatggatgggcaccaccagtgctcttctatatggcttttttgctaatcttctttggctgacaaatagtgaacaatgattatttctttggatattgaaatgactcagtcaagttagaatcaattccttttagtttgttgacctatcctgttgttttaaggttttcttttttttaaccaatgtgtgtttgtgtaatacatagttataatagaacaattaggaaatataaataagcaaaacgagaaaaaattcttccataatgacaatttacagcacaatattgcattgtgtatttactaaacagcttttctgagtaacaaagaaccctaaaatcttaatgggttgaaacaggtattcatttcccttttcaattactttttggtggctacagaacggctgtggcagagctctgctctaagcgtcttctcgttgggagatccattttgaaataacagttgctcagtgacaagcccttcctgtggtggaagggaagaactggacgctgagccaacctatacagtgcatttaaagctgctggaatgggacatgggccctatttgttcatagtccactggccaaagcaagttacatgggtgtggtcaacatcaatggagtaggaagctttccttgggaaaccttgggagtaggatatgcagtagatatttgtgaaaagtagtatttttgatactcttgatcacaaatattctttttccacatacaaaatacgtttgtatatagcaatacaacaaccacattccactttcttgatcacgaatactcattcccctccaaaggcagaatatactcaactcctccccaaagaatagttacccagacatagcctatgtcactttctttaagacttttttaatatagatatagatgaacacatatttaagtgtggtcttcttttttacctattaatatactaaaaagatctttacatatcaatatgtatttcaacagaattttaatatttacactagatttcattttatatgccttatgttatttaacgaatttttttttttttttttttttttttgcttgagacagggtctggctctgtcacctaggctgaagtatagtggcacggtctcagctcactgtaacctctgcctcccaagctcaagtcatcctcccacctcagcctcccaagtagctaagactacaggcacacgacaccacacccagctaatttttctatttttttgtataggcaccgtcttaagccatgttgccctggctgatctcgaactactgagcttgagcagtccacccggcttggcctcccaaagggctgggattacaggcatgagccatcacgcctggcctagtccctcatttttagacattgttattgttttcattttttgttattttcaacaactgcttcaactaaacattttttcatttccttaagaattactgagtcaaagaatgaatgcagatgtttttgtgctttttatttgtattattaatacaataaattgtcatctaggaagggtgttccatactatttctgggccagtttgactgatgaaattagtactcattgtctcgatttgcatttttggtactagttaatttttatttttcttatgtttatggaaaacttgctttcttcattttggggttgcccatttattttttccaatttttaaattgagatattcatctttttcttagttgatctccaaaacctttttattttttttaaacattattattacctttgtcgtatatgctgcttatatttttgctggtttgtcttttaacatattatttttctactttcagtttttaatcataagctggacaaagacatgaatgttgtaggaaggcagaatgaaaagaacaaagcaatagaactagataggaagtgtctcagcaacttagcagaactgagatggaaactcacaataaggttctcttattggggccagacatggtggctcacgcctgtaatcccaacactttgtgaggctgaggcaggcagatcacgaggtcaggagttcaagaccagccagcctggccagcgtggggaaaccctgtctctactaaaaatacaaaaattagccgagtgtggtggcacgtccctgtaatcctagctactggggagggtgagacaggagaatcacttgaacccaggagacagaagtttcagtgagccgagaccacacaactgcactccagcctgtgcgacagagactctgtctcacaaaaaaaggttctcttattttcctttatacacggagtttaaggtccccattgtgtaagttcatcttgctagaactggtcctctagtaaagggagattcttcatttagagtctagtaagaaaaataaatgtccagagtaaagcacattcttatttcagtaaagggttgtgtgaagctatggcatttttcttaccctttagttgccaaatggtctaaagaactactagcgttttaaagagaggaaagaaatgtatctgttttcagttggaaagtagcattttggtacatcatgctttgctttgtttcttgctttttcatctttttggcatcttttttaaagatcttatctgccaggaagttccttttttcttttttttccctttttcgtggatcagctgctttttggaatcaatgccacaattttaggaccaaatcagtgatgctgcagtagtttcagggttaaaagcactttggttaatgtgaaattcattgtcaaatatacttcaggacaaattatgaaaatgatagcattgagattcagctgtatccatttctattcatggcttaatgaatattttcaggcttagtgttatatattctcattagcaacatattcatgttattttacttattttaaaaaataaacaactaaaggttagccaccatcttctcggaaatattaacagcatccattgtactgcagtcatccagtcttctgtggaagtcagttgcatgttatttactttaacaaagaatttcatgtccaagggaattctctatatgggatctcttttctctgggtgatttattttcactggcaaaatggtacgtttctagaggtttgtgtgcttatgagtttggtttaaacttttccttgaaaagtaaatgcttgatcccctcagagtccaaccacctagtgataatgaagaactgaaggatagttatttcaatttcgacgtcttaaaagtgcttaatgagcaccttttcatacctttaaggggacctctctgtgtaagtctctgaaggcccttgctgagacattggttcatcagtggcaggctcatttgcatcttggtccctgagcggcttcagtgtgttttacagctgcagaatgcactggaaacttctgcccctttgtagactattaattcattggggagaaaagccctcgtgacgaggcagtggcatctgctggtggtgttgccttctttttcttgtattccttttttaaccaaaaagttaagacatttccttcagctctcgacactctcaaataaggagagttcctcccattaggatttttcacagttcttgcctcagaaaaacacaaaaatcaagataataccagaaaagacatggagaaagacattttaggagaacatgaaaatggctatagcaggcactacacaaagcagtaaaatgcctcttataaagagtacctatagctgtccaagcgcggtggctcacacctgtaatcccagcactttgggaggctgaggcgggcggatcatgaggtcaggagatcgagaccatcccggctaacatggtgaaaccctgtctctactaaaaatgcaaaaatttagccaggcgtgatggcgggcaccggtagtcccagctactcgggaggctgaggcaggaaaatggtgtgaacccgggagccggagcttgcagggaaccgagatcacaccactgcactccagcctgggcaacagagcgagattccatctcaaaaaaagaaagaaagaaagaaagagtacctatagctagaagagaaaaattgtaatgctcccaccacaaaccaaagataaatgtttaaggcgatgaatatcccagttaccctgacttgatcattgcacattgttgtgtatatgtgtcaaaagaacacacatacccctaaagtacgtacaactatgattcacaatacaaaaaggggaaaacagtaccaattaaggtaaagatgtgctaccaaagatgtgctaacattttacatgatttccatctcataactcttagaacaacccataaagtaggttacctatgtacataaacacacaccaaaaaatttcctccatcaccaaaatcaggtgatgttttgaagtcatccgggagaatgtggatctgagagatacatttccaatatatttcaagatgatcttaaacatgtagaaagacctgtcggttacaaattgattatttcagccttcctctacagatggacaagttattggtgtaaatacatggcagctgtaaatatcagtcggagtatctgaagtcactcccaggattcctgggaaaacattctgccttgggaagtaaaatgctgaaacgaatgcactcttaaaggggttttgtttttgcttcttttttgttttcagctctttcatgtaatttcacataatttgtaggcaaaaatcccaagagccgtaaatggtcctgtgaacatagtatttcacaccagtgatattttcatgtttttttgtcggttgaaaaaacctgagatgaaatagtgttcataaatctctactttgtacgtagatttttactccctcaggaaagctcatggctatgcagttgtaaagctcttatatttggtaaatattaaagcaaatattcacttaaagtcatactccaaatattactgcataaatcagtgcatttaaagaaagttcacattgacaggcacgtgtatatatcctttaaacatcttggaacttactctgcactactaggaagccacttttttgtttccttcaacaatggaagacttcacttaaatgatgagactagtacatacacatttggtttaactggactgcaatataaatgttcagcttaccctattgataaacgatgtgattgttccattctgtataaaaggtttcttgatacatagtatgttttcaattgtgtaagcttcataaaggggcttgttgaaataggttactgtatatgagtttaaaatttatagcaagctgaatgagacttgtattgtgtttgaaattatttataccaactcaagagacacagcatttcttgtgaccaaaaaaaactattttacttacagtatacaagataaaaatgtttcatgtggccagtcacagtgacttgcacctgtaatctcagaatttggggaagttaaggcaggaagatcacttgggcccaggagttcgagaccaacctggacaacatagagtgatcctgtctctacagaaaaaaaaaaaaaaaatcagccaggcttcttggcacacacctgtggtctcagctacttgggaggctggggtgagaggattgcttaagccaggaggttgaggctacagtgagccatgatcacaacactgcactccagcctgggtgacagagtaacaccctgtctcaaaataaataaatacacaaaatattgttttatgaaattatagagttttaaatttccaaagaccttggagattataacatcagtacagatatataaactgaggtctggagatgtaaagtgactcttccaaggctgtatcacaggatggtggcattgcgtcaggttcactcaaatgttgtgaatcttagtcctgcatcctttctactctactgtttgcttacccctagacggaaggaaagaaagaaaaaaccaaaggaaagaaaaagactgaaaaaaaaggaagttgcagtattctacgtattggtcttcagtgtgatggtgtgaaacccattggtgtttgagttgagaggtctcgaggcttggcttctgttcctggttttcccccagtatgtctgctaagagaccatgttgtgcttatgcttattcttagctccggaagcacattgttgattttctcaaatattgttttcaggttattagaagtggagcagaaaggtttaagcatgggagatagcctctcacgagtgttcacactatttcagcagtatgttatatctttaagagcttgatccttaagaaacaaccgtactctagaaagtacatcatttttcctattactaataatgtatagataactcattaataggaatctgtaaaatattcttatttttggccaccgatatgataaattcttggactttatgtaccttttaaagtacatctaattaagtgattaggaggtctgtttttaaagggaaacagggaaagttgctgcattattgtctgggtttggtttttatattgtatattatctttaatgttaatacaacagtcccaaaagatggttgctaatttcaggttctgtttctctaattcttggcctaggaaaatgaaaataaggtttgactgaaataagattctgttcaaatgtccttgcaaatgaggaagcctcacattaccaattttttcccaggaattttattgttgattaactgctgatggggtagaatttatagttgagaataatttcaaaaagttaatcagttgccaatgggcttagtaaagaaaggaaaatataggagcggaatctgcagcttgatttttgtggtttttttttttgggtggggatctcattattgtttgtacaatgtgtgttactgcgaaaaaccctaatgaactttggcttaaatactggtaataactaaaactgctcattctcccagtgtgaccacccaccattctatagcctaccatgcctatccaaaagtttataattaatttatttttatatcatttgaattctttttcctgtattgcccagcagtctttacgctacctgaaatttttaccagaaatgacagacattccagcacatattttctaagggcactatccttcatatagagtattcggtcaagtgagtagaaggttagtcaaactcattcaatataagtccccagttttcactacactctatgaattgttatcaacctgaaaataagctcaagaaagaaatgttgggtcgtcttgcctgactgtgactaggtgtcttcatctgagtaggctacattactgtagtaaatgatctcaaattgttgactggctccaacacagtataagtttgtttcttgtttacatggttgtcaaagctagatattcctggtgaacagattgcttctttttgcaaaaatacagcagcctctttccattttgtggcatcatcatcttcggggacttatgaatttttctgtatttggcctgtaaaagtaaaatgagtagtggctcttaaaaagcttggcctggaagtggcacacatagctttcactcacattccttagcaggaatctagttgcaagggatgctgagaagcagtctctggatgttcccagaaacaaccctgtaccatgggaggaagaagggatttaggtggacaaacaggcatctctgccacaccaggtaaccttttcattcatttccttatgagcctggttgagtggggtttcatctttgggtcttcagatgattaatattaatacagatttactatctctcattaatgttaattttaaatgatagtgtttctacatattttctagaaaaagctagtacttttttattgaaacttatctcacatattattgttcctgcatataaaagctaacacagaactccttaatcctaattaaatagattagttggaaatcaatacacctacttctgacaaagaagccacatagatataccatcttggatgttacttgtatgattataggtatatctgtttgctattgctactgtatcaaattaccataaacttgttgtcttaacacaatatattagctcataggtctgaaggtcagaagtccaaaatgggttggcagggctgtattccttctggaggctcgaggggagaatctttttgcttgtcttttccagcttctaagagctgtctattccttgattcatgaccccctttctccaccttcaaacctcttcttcccttctgcttctgtcatcccgtcttctctgactctgaacctccaacctcttttgtaagaacgctgtgaggctgagcatcatggcttgcacctataatcttagcacttcgggaggccaaggcaggaggatcacttgagcccaggagttagagaccaacctgggcaacgtaatgagacctcatctctacaaaaatttttttaaaaaattaaaaaatgttaaaactaggtgggcatagtggcatgtgcctgtagacctagctacttgaaagattgaagcaggaggctcagttgagcctaggagttcgaggttacaatgagctatgatcgcaccactgcacttgagcctgggctacagagtgagaccctgtctctgaaaaaacaaaacaaaaatacatcctgtgtgcccactgagacaacccagggtaatctcttctccttaagttcgttaacttattcacatctgcaaattctcttttgacatataatattcacagagtatcataaaaatcttgtgatctgagagttaggacatggacatctttggggggaccattattcatctttccacaatagataaattatgtacagactttttctcagagaaaagtgatgcaacgatgaaatggatttttgtttgcttttcagaaaacaatttgctgatcagactgtgctgtgtagtgacgaaatgttgatgccagaaggaactggagaggttatttcatccaacactcacatttcctggatgaggaatctaggacccctaaaaattgatagatacttgcccagaggtaattcacgcaatcacaggcagagctttgggaccttctggggattttaagataaaggaggagagaaggtgccatgttcttttcttagaactccatttaaagcattttgtttctttaagtaacaataatgttctagaatataaaatgttcccaagttgacttctgatagcaacgaaatgttttagtgaatcatggacctcagaccttaatactgtatataaaagaaacacttttctataatgttctgcagagcactcttgtttacatagactgtcaaggagatgggctccatatttaagagaaaatgttttgagtcttatcacttgtcaggtacttttgttggccagtcaggagtggatggtaaaagtactgacaattctcttatctcattcttagcccgttgtttcctaccctctcccccttgcctgtgatacccagtattgtcgccactcaccccatgtcgctgtcgagcagttaatacctggctagtccaaattgagatattctgggagtgtaaaatacacaccagatttcaaagactcgtgcagaaaaaataatgtaaaatatctcattgtttttattgattacatgttgaaataacttcttttaaatttgataaaatagaaagagagtcttactatgttgcccaggctggtctcaaacccctgggctcaagtgatcctcccacgttgtccccgcaaagtggcaaagtgctgggattatagacatgagccaacgtgcctggcctgaaatggtaacattttggatatatggggcaaacaagatgcatcgttaaagttaattttacttgttttctttttacacattttaatgaggttactagaaattttaagttattatgtggcttttatagacttctattggacagtaccattctatacttttccccagctctaatgatgttccgatttgaggcacactactgctcccttatcctatgagaatcagatatcttagaactagtgcagtaaaaatggagtatttcttatttgtattcacaagctaggaagctcatcatatcttgatgagtgactgtgatacttattataatgtactaagacctttgtaattctggggaaaatgcaattagtaatatctgaattaaagaataatttaaaagaaatgcacttttatttgctcctcggaatgtatcttaacacaagctgagcaacgtgctgcttagtaaaacaggccacacagagtaattgaaagagcatagtcttgaggatccaagtagattcaacattgaatccaagctcctgtcttagctgaaaagctttagacaagttaactacttcctctaaaaccatgtataaaatgggactgataatatctatctaatagtgtttgtcatacgtattaaatgagataatgtgaagtttccggcctgtatgaaattccctggggaacagactgagtcgtatggaggtgaggaggaggtggaaaggaagcaggattgggcagagaggaacggacggcaatgccatctcaacaaaggcctctgtgaatccttgcagagctctgggaccggaggtcggtggagaaagctagagaggcattgacacatcctcagatgcaggtcctgtctcccatgaccctgggccaggcaccttttttcatctcagggcaattctcagcgacagctgccaggtgacgctggatgtgcccttgattcctgaaggggtgtctgggcagctcagcacagagtctacccaggaatgtgcattccccccgttcctgttaccagcttgcattacacatgagagagggtactgttctggtcacatgaagttatcattgttaatttatccatttgacttgtttcatactccttcttgttacagacaacattttttaactcatctgttccaagtttctgtaatggtctttctagagtgtagtccttggaaaagaactgtgaggttacaaggtagataaattcaactttacaagataatgcaaaattattttctggtatgtgtatatacccaggaagagcaaaaccgttgagattggtgtcctcaagaagtttaatggtgatggttatgttctgtttcatgtacttggaggaatgtttaagggtgttttttattatttctaatatcttgtgtaaatattatatgtattgtttcgtatgtgtcagttattacataataaaaatgccccttaagggggaatagatcaaagttatccacagttctatggaatccttcaggggtcttctggcatacatggaagaagtctaatagtttgtttctacagtatttgatatactacctagtttggtttatgacatgacaggaggcatcaaagatgctgttatctttttacttcatgcatgcacttttatgtctgcaaggctgatttggggctgacaggtatcaatgactgttgtgtctgcagtttcctctgagagagattaagatttcatttagattgtcagccttcacatagccagcccaagttgtgatctcaatattactgtaacattagctctcatcaggcctttgtcgttgctgttctttgcaaggaagctttctccctctgctagggatctttagtctaaaagtctagaaggctaaggatccctagtagaaggggaaggagtagttttacccctagagaatttgggaattgcacagcctaactctggtcccttcctgtcttagagggtcttttttcctatccatttattgtttccttcttatataaaaatgtattagatttttttaaatatctaagagttagtatttttatgctataattttcctccatacctttggccagctccaaggatcccttgaatcagtactaccacatgaaaacagtttcatttatcagaataattttttttttcagtggagatagggtttcactatgttgcccaggctggtcttgagctcctgagctcaagtgctcaagtgatccgcctgtcttggcctcccaaagtgctaggattacacatgtgaaccactgcacccagcctatcagaataattttaatttattatttaagaagtgaaagaagcttccatctagagaaggaacttcactttttttttttttttcggagatgcagtctcactctgttgcccaggctggagtgcagtggcacgatctcggctcactgcaagctctgcctcccgggttcacgccattctcctgcctcagcctcccaagtagctgggactacaggtgcccagcaccacgcccggctaattttttgtatttttaatagagacagggtttcaccatcttagccaggatggtctcgatctgctgaccttgtgatccacctgcctcagccttctaaagtgctgggattacagacgtgcgccaccgcgcctggctggaacttcatttttaatttagttaatttgagttttgtagaatgttttctccacaggcttagggaacagtgtggtggtagcagatgaggagagttggctggcaggttagggctcaggtgggtgtggtgggcaggtgttgaagggaccaggaacattttattgatgatgatttactgtgtggtgcctcaggcttgagtaggtaccagtgtcttcttaatctttgtcactgaaacaaaacactggcttgaggtgctctagttaccttactgtttcatgacacttggacaggactattttcagatcccaaattcttttttcagatctttcctagcattcagggtccagtgttactacccatcatcactacttacctatcagatgccatgctaatgcttcatctctgtttgccctgcaccatctaatataagtcagttgtaatagccaggattcctggctccaaaaacatggaaactgacctttaataacttaagagtaaaaaggaatctattgaaaggtcatcaggtagttcacagaatggaggaggaggctattttgaggatcatattagaaaaatagacttgaaccaaggaggctgagtgcagaggaaagtgccacgttgcttccgtaggaaaagtgtggggctagtagcctgcagttgccaccacaactgcaacaggggggctctgtcaccgactctgagtctttacgccacttttttgagagcatcatatggccgggcttaggtcacatggcttatacctttgtttccagcttacagggacagggaatacctgaagatttccgctaaagcaggatgttgttttggtgagtagcctaaaatcaacaaattttaatacagcatgtttccccctgtttttaagtgaaatatagagaatttcaggaacttattcaatgtcactgaccagtcaatgacaaagccaagatatgaacacaggtccgtttggctcatagccattgcgctttgctgccgccttatgtgctgttgacctggtagaaaccatgatttggggcttggccacattgaaatttggatgaggcagagtatgaaatagcaaatctgttgggtttgtttgttgtatttaaggtcgtatgtgtcaagctggtctgattcatagaatccctactcattgaggggtagcagcagtacaaccagcagttgggggaaatgtgtttgaaatagccctgtcttctccaaattttgtggtgttctgctccatttgagaagttcatcatctccatgttttatgtagcccggccttcacatatgtcagcgtctgtttcagatttttctaaacccttcaggaatttacttgaggttgagctagtaccagtccaaactcccacctggacattctacccccggtagtgaatttctgcagccccagagcttagctttggtattaaagtttgaattttaattgttccccaactatctgtactccatcctttaatttcagagagaccttatccagtgaggagttaaaataacatctatataatataggcagtttggtttactgcccttttgaatataaaggccgaagatacatttggttacagaaaatgtgcccaaagtgacaattcttgcagctagccaaacatcagttactgggaagaaaaaaatgaataatcccctcaaaattccaatcaggttctgttactactttttaaagtccctttgatagcttttcatcatctttaaaaaagcctctcatcatccttcttaaatatatttctcagctcccgctccattatggcctgattttcttctggttgctcctgcttttaccttttacccctccgtcagagggccttggcacagactgctgttccctcttttctcctgttcattcttcagatcctgcctcattttctaaagtcctcagggaagcattcccagacttccttaaggccaggcccattccaattgctgtcagagacttccagagctgcagtaccttgtgattctcttccattgtattggcacagttactgttttacatttattttgggtattatttgattattacttattgattgattaatgtctatctcagtgtcagctcagtgggaagaggaatctctctggatttgcataatattttattcctcatgcctggcacagtgaatgagggaagttaaaatgttgaacagaatttaaacagatgttttgtcttttgcactatagagcttacagttactcttacattgtaccaaatggtcacccttttttgatgaaactaaatatggcttgacattattaaggactgatagaaattcataagtgacccagactaccaagcaaactaatcaaagaaatgaaaaatgaaatgttggtaattttagaggacttttgataaatgaaaatgagacagcaaaaagtggctccctctctgtctctgttcaaataatctttttttagaaaaaatgcacctagggtcatgtacttcgactggcattgttttttacttagagaataatttgtctttgatgtgaagcacaagggcagggatctctgatcattttattgcctcctagattcaatgattggcatgtattaggcacttggggaatatttgttgagttgacactagatgttagagataattatggacgggcttattggattagcttttgaaacagtattttctcagcactcacccttttatatacaattattggtttactcatctggatgaacagctttggaggctgtgaaatagcatttctgtatttgcattttgtgtttactttgggctagaattaagaataccttcttgtagcacagaaagaagagtttataatgcctcaggtatatagggtaagtttttctgatctccggaaggccctgtagcttcacagttttgtgtttgttttccatatgatggttggaaaggtctgagctgactgtggcattgtcagctatacagagttaagtgtgtgaacacacagaggccgtctttgttctgcattgtccgtacttctaaacagcaaatctaatgcatcactctggtctaaaacatcttacatgactggtcttgttcatgagggggaaaaaatgaggtttttttccaggttcaaaactgtttaacttatacgggtgttccccctgccttaagaatgttatttcatttgcaatgtaagaacgttctatttaaagatttttccccccatcctgttgctttgtatgtttgaggaacagatggaatcaaaagcgtgtgatgctccaggaagattgaaggctgctggagtgaggtgatgcgtcctcataggttgtacaaatcataggatttttttttttttactcctaaccgccaattcttatagtgattgttcattaaggttgatttagcttagattctagtgatgtcttatggactaaggaaatccgtagccccactgctagaaaaaactttgcagttttatgtccaattgagatgggtgaaggcaagccttattggacctttctgagaaggggcaggggaaatcaagggaaggggctctgaagctggttcagcaggctggggtcgaagggtgacggaccagacagcgaggaagaggtagcccggcactgtgggccaagtgtttattctgggagaaagggtctgagtcccgtttaggaaagcggtggtgtgtccatcaaggtggtaggttagtgacacatggcagcagggttctggtgcaggctcagatgtcaggcagtggagcctgtatcaggcctcatgtggctggaccatctaggggataagaatcctgtcctggggtgtagagtgttagaagaagctaggctgccaccatctgctggggttcaaaatagatccctagactagaaaagtattagctggaaaggcctggaagaagacaggaaaaataaagcagtacgttttgatccaatgtatctgttttcctcatgataccttgtgtgtttatgtatccttaacagtagtagctatcgttctctgcaaaattaacttgctttgtagtcatgttaccgcatggaaaggaatagcactcagagaacgaaaggttgcgtacctcactcctgccaggtcaaggacagggagctgtcacatacgtttcaggactccaagaccagttcctacgctattggtacagttgattttgtcctttcatgtctccttttcgtagttcttatgagtagctggcctctatttcacttctagagtcagtctcccagccttgaactttccatttcaagataacctttcaggccttaatgtagtctgaagagatatgtgttcgtggaatatttagctttcaagaaacaaatagcataggaggaaaaaaagaaacctcaatattggtaattaagaaacctgggcccaagtctcagtttggtcacttcatagttatgagctcctggacaagtcactttgtttctgtgtctcaggagtcatctatagaatgaagagattgaagatgattcttgctgaggcctctcccagctctaataataagtccaaatgaatagtctaggaaacaattaatcattagcatctttataacagcagcactagcctcttgaatatgttgggctacgtgacaaacatggacagaaaatcttggcaagcccctgccctgtcactcccaaatcagcctctgtcactttactctgtttcagtacaagcaaatgtaatgtgaggaacctagggaaagtcatgagagccttttgaattaactgagtgttacaaccgccattctgttctgaaaataggctgaggctgagttcctcttgacacctcatgcctctcttccctccccagtccttcttggtatcctgctaattgtacctctagacaattggtatttataattcatttccactttagcttttctccagagttcatacctcagtcttcacctccttctactaatggttctgtgagattttcttagcaaagagggaagtgtctgcctgggtgccgtttgatactctcctgttgatttcacttgggatctgaaagcctttcagttcattgatactctgaagatattcatcattataattatggcaacagaatttcttgttctctctacctcctacccccgactgaatgtgagctgctcaaagttaggggcctgatggtatcagcgttgtgtgtccccagcatctggtacctagtagacacagcaaagaagtgtattgagttcatttctctggtactcttttgagaggttgagtttttctgatgaccattaactaggtcccttgttagaagccttttagggtttatctaccaaacggtgtccttagagaaagcatcagaaggtgaagcaccagtttccagccttccgcttaattagtttgcttcattaaatgtctcctgctattttgatttgttatggaagtcaccttcactttctgctaaagcttttgtggaaagttattttgtacctttaaacagctgcttctctccaggaagcctgcttttattttatagcaagccggctcggctgtctctgtacaggctggctcatgtctataaatggtcaaggcctcagagccagatggggcaggacagggtcatccaacacgtctttgaagtgattatttcatattgaatctagttgtgaaccccatatgtacctaacaccatgattgtgggtgataagaaataatgtaggatgaagaaaataagacttgttcagaaaacaattggaaaactatgttgtttcaatgttaggatgtgatacattgcaggggtattattcactgcatcattattgtagcaaaagattgcagactaaatgttcaataataagaccctgttacaatatgatacattcacatgctcgaatactatgctgctattaacaagagtaaggcggctttgtatgtgataatgtaacaggattttgataagggttaaaagagcaagaaatattaagaaggccaggcacagtggctcacgcccataatcccagcactttgagaggccgaggcaggagtatcgcttgagaccaggagtttgagactagcctggacagcatagcaagaccctatttctaccaaaacaaacaaacaaacaaacagcctgacgtgatcgtgccaggtgcatgcctgtagtcctagctactcaggaggctcaggcatgaggatcacttgagtccaggatctttgctcatagctgcagtgagctattatggcatcactgcactccagcctgagcgacagaacaggaccctatctctaaaatataaataaaaatagcaaaaatagaccaagcgtagtggctcacatctgtaatcccagcactttgggaggcagaggagggtggattacctgaggttaggagttcaagaccagcctggccaacatggcgaaaccccatctttactaaaaaatacaaaaattacccaggcatggtggcaggtgcctgtaatcccagctactccagaggctgacgcagggagaattacttgaacccgggaggcggaggttacagtcagccaagatcatgccactgtactccagcctgggcgatggagcaagactccatcttaaaaaaaaatagcaaaaatatatatcatgcttccatttatagtccatgagaagaaaagggatgggcaagcgcacacacacaaacccaaacacacacacgcacgtggacacacacacgtggatggcttattatctctggaaggatgcataggaaactgggaacagttcttgtttcgggcagagggactgaacaggaaaatggtacgggaaggaaacaaatttcacttcatacttttttgtatagttaggggggaaatcatttcgtatttattgtattcattttttcagaaaaaaaaaaaactgctaaattttctttttttgagacaggatctcactgtgtctcccaagctggagtgcagttgtatgatcacagctcactgcaacctcaacctcctgggctcaggtgatcctcccaccccagcctctcaagtagtcaggaccacaggtgctcatcatcatgcccggctaattttttgtattatttgtagagatgggtttttcactgttttgcccaggttggtcttgaactcttggactcatgtgatccgcccgccttggcctcccaaagtgctgggattacaggagtgagccactgcacccatcctgaattttctttaaaagaaagttgaatgacgtgagagccgatagagaagggaaacttgtatatttaaagtagttcctttatttgacagctggtcattgagctccggctcttcaccaggttctgttttggcctctgagatgcaggtaatttcaaacagctatgagtgccctgaagtcacagaagtaggggttttggtggcaaatgaatgactagggtggagctgggctgctgtttaaggaaggatggtcacagaaggtccttttggaaaaagatactgagctgactgctgaatgaggagaagccagcttagtagtgaatcaggatggggcaacagagttccagacaggatgacagcagatggagggtcattcgggaaagcttcagaaaggaggcaagcttgccttccatgcatgggctgagtggaagctaaagtgccacgcactcacctggaatgaagagtcaggcctgactgacaaagataagaagagtgagaagcggttgggattaagtttaggtcagtaggatgaggcctgagcatcaagggcccctggatgctgaggtctgtacagctttttcaggtacctcttgagacatactcagatatgtcgcagggatcatctgctgtgagactgctagcagcattgtaggagttctcttcactctgtccacgtagaaatacgtgttctgcaacagagagtaaaaggcaggagcagaagaaaactttctctccctgacttgcagaaaagctcatggcaggtttaaaaaggacagggcaatgcagacagctatagtgtgagggacacagcgtggttcctggtatacttcatgcgagaatctgcatgctggctctgtgatagcgtcctcatcaggaaagtggggattgcaatattacctcaacccacttcgcagaattgtcatgttgagagtgaaaacaagagaacaagtggcttctgtaaggtattaggtgttaaacagatcgatgaaagtggttattagtggagacagtacaggagtaacgtcaattgggcagtctttgggtaaagatggcgtccttctgctaaacctcccagaaatgacatgtatcagattccatttctgtacatcctaccatatggttttagtttttgttgttgttgttgttgtttgtttgtttgttttttaatctaaccattttggtggagaaaagaaagttcatcaggagatagtttataactcctcattatgatgactgacaaatatccaaagggcatgtttcttttaagcccgtgcactgtctttatccccacacagaggcaggcgctcatgtcttttacacgggacattttgaatttttatctttattatggtattagtttcttactgggttccacctcaagcttacttttgttaactggagatctttacctgtagactcgtcgtctgcttaagttagaactaagtctattccaaatgatcgattttattttactgctatagtacaccactttttatgtctttggaatatgctttgtaaaatagtaactttacagaatttttcttaattctgagaaacagttatttggtagcttcagtttcctaagaagagaggaaaatgtacctcaaaggacaggagagtccccaagatcttccaaaacctattccaaaaataatctattattattttagatggtaacattttaccaatattaatgtcttcgtcttctttatagcacaatagaagcactaagtgctttaaaaataggagatgaaaagttaaaaaaaaaaaatgtaaaggatataggaagaaagcccctgtcatgaggatgcaacaaaacccaagggtcaaacatcaccctctgctgggcctgttgacagtagagggaaacagttacctgacattaaaacataactttagtaattaaagtttaagaattactttaaaccattttttaaaaaattaattatctcaaataatgctcaagaacaccagtgcgttgcaaaatttgaacattggtacattgtaaaaaaaagtgtatacattcttgagttgtaaaggaaaagtttaaatctgaggggtgggatggattgaggctgacgtttttcccagagtggtctttgtaaacaatgtttaagttttgttatttatattaacacgaaagcctcctttatctggagaacacgcttatgtggctgagcctctgtccctgggatgccagatagtgagacatcgcaatcctgagtagtatgctcaaaactcacttcatatgttaggagctaaaatggtcttgttttctagtaatctccagtttgtgattcgtactcagaggcttgcacattgctgtgtacactgacagaacattgatggcttttggaaaagctgcttgctgcttgttgcccggagttagctttattgctctcactctgtgccatattgaaagttaacctgtgctaaccccccagtcattttctcagtctcctagagaggtaacagaacatctttattctggatttgccgtacacactgacataattcctcttgaaatatctggctgtcgtagtctaaggtcataagaaacatttaattcttcagaatggcaacataatttgaattgctgtcaaacagtgtgtggcctgaaacgggaaagaaaggaaaattattgatcattgagatgcctttgtgtctcgcatcgtttcactagcctgtaattaattgagccttttgacgtccatccatattttttttcttccttgtggaaattcagctacgttcccaccccacatggtgccttggagattacttgagacttttatttgtggtatctctatttggttgttgacattaatgagcttacttcacaaatatcacaagagaaatagtgttgctttttggaatgttaatgaattgcttgcctggccaattgccattcgttccagtgtgtgaatatgatggggtgtgtgtgtgtgtgtgtgtgtgtgtgtgtgtgtgtgtgtgtgtgtggaaaagagagacgagtagcaggggtggattgcatttttttcctctttgcagccagtgacgtgagctgtgcctggaacaatcagactcgctgcaaacagggtagttgaagatgctgggggaggcagcctggtgcttcttaagctaacgcggatcacggcgctcaggagctgctcaggcacaaccccgcagagttcctccagcgtgagagccttggaacggttggaaagtgcctttttatttctctaaaccccttccttagttgaccttcgaaaatgattggcgtgaatagtgtccagagtgccagcaaggtacgggtgaggacctcaggttccgtgaaatactcccgggaggattctatccggcggcagtctcacaggtcaaagtccatgaaaatttccaactcctcagagttttctgctaaggagaacaaggtaaagaaataccacattgaaccttattgacagctgtgtggcagggcaacagaattggatagtctttggcagtgtctaatgtgcagtgatagactgagaaagtaacgaggagtataaaatggttctaagagaatcaggtgcgatcaggtgaaacggatgggacctgaactccagatacaaagatgctgtggcatgggtcagttttgtaaagagccagtttgtggaagagatgggcgaaagccgtgctcaaaatgagatgactgtgggaaactgttgtttggcacatcgatcttgtttttggtctcagaaaggttgccttgacaaatgatttttcagtgcggagtatttttagaacatcaggaatacagagatattgtgtatgattttatctttcagttagttcctttttcctttcctcccctggtcttcccccagcccccagtctgtggagctgatgtacaagtatgacctggtcctattatactacattcatgtcaggtttagagtggttagccccaggcatatgtaatgaagagaaatttcttctttcatgttccttacacatatatgtgctgatgctatgctgccatgaaaccactcgtgtttttgcagctgtcttgaagataatataatctttgttcgtgtgaaatgtgaagggagtgattacgtagtgaagtgggcatttactacatgcaacatattcttgagattcttcccaccaccatctgtgtgagcagggtactcagaaacactcccactccacaggtttaaaaatggaataatagaatcataggatcacagaactccaggtctggagatggagatgattataacggagattcatgggcttgataatgtgcagagagagcgtcaggaggtggatctcagtgtcatttcagccttctcggggttatatccagacccactgagagtgacatcaggctttcttcaccctcccaccactccccactgccctcctcctctgctacctccccatccctgtgtgacataacattattgaaagactttggcattaacaggttcccctcaaaatatggcaggggacaggtggcaaaataccttagtgtgactttaagaaatatgttggcttcctattcacccccttacattatgacatagtggagtctgaccccctccgtcattagcaaattgcctggctccagtaagtcttcaaatctggctttttactcctcactgtttttttaaaaagctttatctttagagagaaacgtgtcttcaaagtcctttaatgtgacctgtatagggatgtgttggcttctactgaaagtgttatgagaccacctgtggtgtcaggactgcggtctcctgctgaaatagaccagaatggtttatcatattcttaaataaatgtatgtgagcatgtatgtaattctcaacatggctataaaattggcttctataagagcactaagagacgtctctggattttgttttggatgttttaatgtggagtatacccatggtatgcagtcagaggctatgggaaattaagagctcatcatccttaactctgttgtagtcctactacctatcctcatgataatttaggcattgtaatattagtgggttcacccagaattatggttgtgtagtgtaatgttggaatccagcatagataccacatgaaaagattctctactgtcctctgtgtttgtcacacagtacaggtacttttacttgatatgtatctgtggaagagaaggccaagcactttttttttttttttttgaatattgcaaacgccgcaggagttaacagtataaaaggccactggtagaactgtagtcagtaggccatcacatgataccttaaagattatagtcggtttttaagagatgattagtatttttttgaggcatatgtggtccctaagttacagaatatgtgttcaaggatatagccaagctcccaatatctcacaagagatatttttaggattatctagtggcttaaaattgaacaccagagctaagagaaaatcagtagaatagaatattctatcagagtgaccctaatcattgactagccatttatattccctaaatgaaataaactgaataatatgacaggcttgtaccctaaattactgaacttaattatactataatagacatgtgtaaaatgttgatttaagcatcacttctcccatttttatccacagttacacgttttcctccaattttaatcagaattttcattgatcttacttgtatctagtagtattttttagcccttaaatcagtgtttcttcttcctcctcttcttttttttttttttttttttttgaaacagaaacaatgtctcagtatgttgcccaggttggtctccaactcctgggctcaagcagtccttccacctctgcctcccaaagtattgggatgataggcacgagctactgcacccagctggtatttcttcttgctaatcatgtaaacagcatttttgattatctgactctttcatccaaaatgcaggatgtctaatttgatgattagaagatccccattgccacctctctccaccctctcatgtcatcttcccaacctgtaaaaaataagataccattaactcgtggttcgctcctgggatttaatgttatctttctagaactctggctctttctagaataggtgtaataattgcttctccttgtcagagttggaattacatgttttgtattctttgaaactttcatctttgatgtttccagcttgttttcttggccattaaaacataatggtttattcaaatattaattatctgtagtcctcacttgttctctgatttattcatattcatttgaaaaaaagtgttaaaggactgtggaaaggattagaagttttgcttttaattttagtgagatatcttaaatgcttttcttggtctaaatattttaaattaagaaaattgaattttccagtactttatggttcatattgacctcgtctgaagaatattatttaacctactaaaattcagcttatagatgttattttctttaaaacccccttctccgtgttgactttttttctttattctgtgtttaaatcttaccatttcctctagagagagtgtggctttgtctttttctcgataataatgtttgtatcaacctctgaagcacataatatgggcaggatgcaaatctgaatatgttttggaagaacatgtgtttcgtggagaccggcattcattattaaaattaatgaagtctgactgagctcagctcttcattgggtgtctgttattggaagagttactagcaaggcttctggccatgagggggcagtgcagaccttcctgctgtcagatccagctggttgctctgcctttgacagaagtaacattttagaatcaattagattctaattgatttctaatttagaaacaatttcctaaaagtagaatacaatcagccccgggtattcgggtacccttggggtttcaaaacccatggatatggagggccaactgtactccagaatttggaatgtgcagtattagaaaatgttgatttaagcctcagttctcccagacatttccacagtcctcctctgagtctaaatatttgtcaaatataaattattctagtactaatttttaacttatggtttaaaacataaatctgtaaaagttcatgttgataaacactcttttcttccccatctcttgccaaactacgtgataccgtttaaatgaggcggaatctcaaactgttgtttctttatgttgttgtaggtgaatgtcacatgagtggattaatataacatgcgtggctgaatccttgaggccttttttgaggaataagcatgatgctagagattagatcaagaattctctagttaataatgttgattcaagtgaaccgtttaaagcttttattcagtgatatagcaaagaaatcaatttctgtgacaccgaaatttcaagaacttccagtaaagtactggtactttggttggtgcatagtgaaacattggcctgttggtttctcagtcaggatgccgcatcctggcgggctaccctggttttgctttctaagtagcaatgttcacctagacaagttacttcacctccccaagactcatccctaaaatgcagggttttgacaaaatgatatctttgttctgaacactgttaattttagaaatcttgccgaggttggtggggttatttcctctgtggaaggaaccttaaagactgagctagatttaacaaaggtagttttatatgtattctgaataaacctcttcctgtactaggagatgttaaccataaacgtgttaaaggaaaatggaagtcctttgctccaaacctctgctctgctaagtgcctaatccattgctttttaaaaacgtgttgcaataatgttgaaaggcaccatcacctctattctccccattctgcttaggcttcacttgctgtttcctttgcattgttagataactgctaatcattgcttcctctgtgagttaaagctatacacaaagaaacctgaagaaatcattacaatggccctttgcgacctgaagttttggtggcaggcttgcagattgttgtcatttcttcctagaccacttttgctctttagactaaggctagagcctgggaaggagattctggtcaaacaggacattgatatctgcctattttaaaatggagaaaattcttagtcataatatgaaaattttcttgcaaatgtctttacatatttttgttattcctaagttgaaggagtacatttttaacctcataaattcatcctttagctgaatagactttattaaaagaaaaacttaagcatatatacattttcaagagtttgaacattcagggatgcataaattagggttgtaccaaaccacaaggggctggcactctgatgagaggtgcaagaaggaaaacttttttttttttttgagacggagttttgcttttgttgcccaggctggagtgcaatggcacaatctcggctcaccgcaacctctgcctcccagattcgagcgattcccctgcctcggcctcccaagttagctgggattacaggcatgcgccaccacgtccggctaattttgtatttttaatagtgacggagtttctccatgtttgtcgggctggtcttgaactcccaacctcaggcgatccgcccacttaggcctcccaaagcgttgggattataggcgtgagccaccacgcccagctgggaaaactcttatgtagtatttgcagaagcaaggcgaagagaacagttttgattggctggaagttagttggtggaaagaatgataggcagagagaaagaaaaataaattttttaaaagaagttgatggtttctgattggtatattttctagtttccatttactgtttacattggcctttggtttgttcatgtaaaaatttaaaatgccagaggtacctcagtctaatgagctcccaaggagaattttttttaaacaacttaaactattaggtcaaaatatcaacatcctcctgcactagttctaatcctggcatttgaaggaattagggaggtggtgtgttgaacaaagtaaatctggtagtgcaaagataaaaacaattttatcttcagaagcctatttttcttttcttggctctcctatgttaagttatactttttcaccaggtattaattattctgccagattaacatgttctaatgttttgtgggtttttttgtttactttgtttttttttttttgagacagagtctcgctctgctgcccaggctggagtgcagtggcctgatctcggctcactgcaagctctgcctcccaggttcacaccactctcctgcttcagcctcccgagtagctgggactacaggcacccgccaccacgcctggctaattttttgtatttttagtagagatggggtttcaccgtgttagccaggatggttttgatctcctgacctcgtgatctggccgcctcgcctcccacagtgctgagattacaggcgtaagccaccgtgcccagtcaacatgttctaatgttttactgtgatccttagccaaaggagatcttaaaaagagacctgacttcttcagggacgtagttctacagattatcattatctgtatcattttcatattatcgataactgtttattccccttaagttgatgacttgagtcagacttgccccaaaataaaaactttcactccttacacaatattgctctgtcttctaggccagagtgcaatggcctgacctgggctcactgtaacctctgcctcctgggttcaggcaattctcatgcaccaccacacccagctattttttttttatttttaatagagatgggtttttgccatgttggccaggctggtctttaattcctggcctcgtgtgatctgaactccttggcctccaaaagtgctggcattcaaggcatgagccactgcgctgacctggttttatttttgttaggaaacctagcaaagtgacaatggtttttgttactgggttggtttgttagagctaccccctgctgcccacctcttaatttccctccttcctctagttcctctgtatctgtgaatttctcaaatcctgctggtactttcatataaataaatgtcttttttaagattgctcaaatgattacttaggagtaaatgttgagcacactatgctcctgatagagtgatatttcttgacccttgaatttaattaatagcagatctttacgatcactgtttacccattttcacttgagtaaagtgtaggtgatgtgtttggtttggatgtctctgttacagaccgcaggctctttggcttcccatgtaatggaaattaacatggagccgagcagatttcccagatgaggctttcaaatcagggcttgtgctcaagcacaagggagacagtggaggtgaggcacagggtcctctgactggctctgcaggaagcagcagggggaagctggtaggtgtttttttattaggcaaagcacagatattgttatcaaggctaaagtatacaggcttggctgggcaaagcacaaaagaggggtagggtatgcgggtcagcatatctggttgtaatagttatctcgagtgatgggctcctcgctggtctggccagcagcaacaaggctgtaaatcaattgttcggcatttcctactcaggataggacactccacaatcttggtttcctgttaaatctcctaaggccagtttctggactaagtgaaacatatttaaacattatgagagcagagagaatggctcttttctttgtgtgactaagtcctcagggttagcgggtatggcatcagtgaggtggtagaggtgtgggttttgtgaagagaagaagaaagaaatacatgaaggagaagccgcgtcccactcctgttgtgtcatctctaactcccaaggtcgtactgcattcttgctcccctccatttatgagtagactgtatttgaacacattcttttggggaaggtgtactgaagcaggtgtttgagaacttccatgcagtatttgaacattgtagagaaaatgctggtccatgctgtcattcctggcaagcttagtgtaatatccttttcagaatccagggaaaggaaaaagaaaactctatgcaataatgataggagtcgaaagagaaaaaaatatatatatatttgcattttaaagatagtcactgccgaagatcagggagtttcgtagcatcatgataacctgaagttgaccataaggagcttctgtgtgggaatatgtatggtgacaagctattctgcaacctgttgttagatcatgcctggcttagagcttagggattgcgtccagcttagagtctaataggagatttttggaaaatattttttatttactcatccatagtgaagcagagaccaagagtagctgtgcaagatggcttcctgcttgttaatttatgatattaatttatgatggaagttgctcttctaacattaattttaattaagatttttaagctttgccttaactatcattcaagcagattttatttctttttttaaaatccactgtaccatgttccgatggtacatttagtgtacctgtttggacacgtagatcacctgatatcggtggaatttgtttttctaggtagattctttgaaatgcttaatatcaaaatttttctgaacgggctggctgaggctctagtcctagcctgactccccttatgacatgccattgtttgtagcctgcagttaagttttacaacatgaaatgccccccaaggcactggaaacactagtgtactcgttactgccacattcaaatctggtgagccaagtgtgtgtttgattccagtaaataaataagattacgaagctatctcaaacagtctaatctccttcttgcactcagctgcagtttagtggtgtcagcgtcagctctactactcagaaatccactggggcaggccaaggtgtttacaggaagcagtaagaccttctctagatcctggtgccccagtggctcatgacaagggaacgaatccttattgagctttttcattacagttttcttctaaggtctcccagcataagtaaatctaaagggttgaggtcctacctaactagacgtacagatacaagaaagtactttgagagaagcagctcttgactgtcactccgagggacagataaaggtccagcagatttatatagattgatgacacttttctttattgttgcttttttttttaaattggagacagggtctcactttgtcacccaagctggagtgcagtagtaagaacatacctcactgtagccctgaaatcctggcctcatataatcctcatgcctccacttcctgagtaactaggcacatgtcaccactccaggctaatattttaacttttttgtagagacagaggacttacaatgttgcccagtctggtcttgaacaccccacctcagatgcttctcccacctcagcctcccaaagtgctgggatcacagacatgagacaccacatctggccacacttctttcttaatacatcttcttaaaaacaggtaaaataaaaaggccatttggaatactcttactatggttggacagtgttttgaggagattttctgtgccccatccaccccctgctgtgatctcttagactgtgattaagtggtatttacatatagcaaaaaaacttaactcttaaattagaatttaaggtaacagtgtgcttttatctttacacccacctaaactccactaaaatgacagtaggattcgtagaccttcaaggacccaaagaatgagagaggatttttcaaaacatcagcaaactttgaaacatggaaaccagatagacgtgttcactatttaagttccacagaaaaaaactggatgccaaatactaaagaaagaaatagatcaatctgtccccacagaacgcagggaaggcccaggaactgggggccactggctacctctgagggcagtgagtcgaacgaggacagccctttaaagcctctaaaattagtaagtcgaccttctgaatgccctcccctgctttgatagccgcatacccttcctcccaccattttctttttttttttaagacaagtttcactctttcatccagtctggactgcagtggcacgatcactgctcactgcaccctccacttcctgggctcaaggaatcctcccaagtcctcagcttccagagtagcaggagccacaggcacacaccaccatgcgcagctcattttttaatttttttgtagagatagggtcttgttttgtttcccaggttggtctttaactgctgggctcaagcaatcctcctgccttggcctcccaaatcgttgggattacaggtatgagccagcatgcccccctgcccgccctacaattttctgttctttctctctgataagtttaatccagaggttttggacttaggaaattaggctcagtcgaggcccacggggagatccccacgttgaaaatagcaggattcagtgaaaggtataaacgtttcacagcagggcgtctcttccctctctactttctcatgtactttttctcagttgcttgaagaagtgaaagagaagacatggtgtccagtagagcagagggggagagggaatccccaggacaatggcaaagggaaaccctgggacaacagctgtgccggagatagaaaccagccagattagaggagtgggggcagagacgatgccaagagacatgcttccaaccatggcaccgaaggaatgcctgctggagggtgtgaagttgacatagagatagattcgtagaaaactgagtaaacaacaacaaaataagatgatgattaactccagggaaatcaaaaatcttacaaaaaatggaaacgtagcctagtgttctgccccatgaataatgtctatatagtcacaataatatgaggactgaaaattcatgaaactgcaaattgtgactgtggtatgattttaatatgggagtggaaagaaagagacgggcagggtgtgtgtgggtgtgtgtgtgtgtgtggatgggtgtgtgtgttaagagaaccaaataaatgttcactttccagagttctgcagttgaaagtcaatagatcatattgaaaatagaaaaaccaaaaagagattgaaagaggtgacttttgagcagcaagaatcagaggtgaagttaaaagattatttgtattacataccttttagtaatttttgattatataaatgatatacatatattgccttgagaaattttttttaatgaatcagaaggaatgtagacagcatatataggtacatacgagactggaataatttccagggactagaatggcttttgtttatcttaattaactttgggtttaacaaatgccaggtaatggagactactttttaagaaaagcaaaaggtttcatctcttccaagactttatactctagcagttatcagactagaccatgttctgctgctagttgctgtcacagttttagtctatagcaaaatatcagtgaaaggctggtcctttcttgagaaacagttgtctcttctgagattgtccatgcaacttatttttatgcaacaataccgataatagttggtgctttgtttctttaaaaaatttattttctcatttagctaaacgaaaaactggcaattctatttagctccctaaaatttcttttgcaaattttcctgtttatgaaatttgaagcctgctatccactgggtgagattatttaatttgtttgtattgatcgttttgaataaaacctatttccatttggtttgtcttcattgctttgtctaatgcatggaaatgacagggaacaaatgccaggcctggcattctctctaaatgtcaaagtcccccagggattgttttttttacaggccatttatttaaaaggattgtgcttgttacccagcaagtttttttttttaataaactgtgcacgttaacttcatcatgtccatagttattaaatataattgaccgtttttcttgggtacttaaaaaatattgcatatatttacaaggtcactttaaatttatgttttcctatgttctcaaattgcattttttattatggtacatgcttgctactttccaacacttaaggcttaccaacaagatggacattaacaaatttcatcaagtacattccagaatctttattgaaaatactggttatggttatgtttttcactgatatggtttagctgtctaaactagacaagtttttgataaattgataaattacagtttcagaggatcagggtataaaagttaaaaacaaaatcaggcccggcgcagtggctcacgcctgtaattccagcactttgggaggccaaggcgggcggataacaaggtcaggagatcgagaccattctggctaacacggtgaaaccccatctctactaaaaatacaaaaaattagccggacgtcatggcgggcacctatagtcccagctattcgggaggctgaggcaggagaatggcgtgaacccaggaggcggagcttgcagtgagcggagatcgcgcactgccctccagcctgggcgacaaagcgagactccatctcaaaaaaaaaaacaaaaaacaaaaaaacaaaatcaggagatgactgtgaacacaatggcttctggaatcatggtgcttccaaagaagaatagttaaatctgctgtggaataccttggaagttaacctttaattcattgtataagaaagaaagtgattcactcagatcataactacattacctcttggaaagagagttgtggctggcatagggttgccagatttcacaaataaaaatacagaacacccaggtaaattttaattttagacaatttttagtgtgtctcatgtaaaattggagggcatgcttatgctagaaatgttattatttatctgaagttcaaatttaagtgagcatcttgcatttgatctggtaactttcaacctacaccaagcaacaatctgcctaacctccagctcctagatcggcgaagtggagtcatcctacttacttcctaggacgtagaagcaggtgtgaatctaggtctgcagctttctagtttattgttcttttttcctgcctttgctgcctcccatcataattgtgttatacagcatcgtcctcactgaagcccttgccttctcagcaaatgaaaccctcgctgtggttaagacaacttacgaagcattatagagactaaagggagatggaagacttgatctcatctgcaaggagcataaaatctaatgtcatctctatttttcatcgaagaagcaaagtgtacactgtgtggtcaacattcaaattgtccagaagattatacattgaaaatccccccaccctgctccccgagttgctgtgtccggagtcagtcattgtcggtggggttgtgtgtatcccctcagaaatgttctattcgtgcccagatactcgcacacatttttcccccacaaaatggaaacataccgtaacaatgttttgcaccttacttctttcctttatctcttaatgtatttacctccttcttagcttaaatgactttaaatatcataatgatacatttctggtgctactgttgaaactgttcgttgtacccagttttttatttgtgcttgaggtatgtgaaaatggtccacctttctcatataatttagaaaaacagcctgatccgtccctaatccgccactgcctgccttcatcccagtcaacttacctcacctctcacccagattccacctgcctcgctgctgtttccctttttctcttataatcctttctccacacagaagcggagccaccctttaaaaacatgaattacagcaggtcaccctcccgcttaaaatcctctagtggtcacccggccagcacagaataaacctctaacttttctggtttaaaagcccttcgggacctgctcacaccacagctgggcccatttgctccagccgcaccagccccgctgggtttctcagacccacccggttcagtggtgcccaggagctgcttacctcgctccccacacctgtgcgtggctgctcccggtcactcacgtcttacgtttccttgcccagaggccttctctgaccatccaggctacggctactctttccagtgaccttatttgaatcaccttataataattatctggtagcctaccagaaagtgacagaattatcgtcatctgttatttttcttatttattacctgcttccaccccactcaaatctaagttctgtgtctgttgttcaccactggattcacgatgcctaaataaataactgttcaactgaatatatgaatgaataaatgaatggttttaagggatttatttttactattataagtgttacaaacatgaattagtcttctagttgttataaaatactttactgtattaatacttataccatatgctataccattacgggattcgccccttatctgcagtttcaggtagttactcatggtttcacttaactgccatcaaacatcgtccaaaaacattaaaaggaaaattttagagacaaacatttcataagttttaaatctcatgccatccggcgtagtgcgatgcaatctcactgtcgtgtgccatcccatgtggacgcgaatccttcctttgtccagtgcctccccactgtggatgctccctgccctcagtcacttactagctaagttggttatcaaattggctgtcacagcatcacagttcttgccttcaagtcacccttattttacttaataatagctgcaaagtgcaagagtagtgaagctggcatatgttatcattgttctattttattattagttattgttaatttctttctgtccctaatttacaaattcaaccttataagcatgtaagtctaggaaaaaaacatacaatatatagggtttggtcccattcgtggtttcatgttccactgggagccttggaacatattcccccaaggatcgggagactactgtatcagaaaaagtacattctaattagtgtctagtagttacaaaaaacaatttcccttcatatatcagcatgtgttataatcaaatatttgttgtggtcattgtacaatagactaatacaatgaggatgcattaagcaaggtacgctatgtagggagatggagtagacaagttataaatagtcagtgatgtgttaaaggagaatttgaactataaaccatcaattcatgtgcactgtgatcataagttttcttagccgtgaacttaggatgatggatatctttccctgtgaaaacattattttttaaataaactaataagaaggcctaagctgatataacaaaaggaaaagctaagaaatgtaatactgtggatagcattgtttacttttaactttattaactctgatttctaggcaagacatttatcagagttgcaaaatttattactgattatctatatttaaaataatatgtacacaggtgtgtatgtgaacaatacacataatactgactttaaagtatgtatatatgtacacaggtgtgtatgtgaacagtacacataataatatacttacatggtgacaatattgtgttgtgattagggcagttaaaagcagagactatggcttaggaaagacctgtctgagatacccagctctgctgtatgaccttggcagcctacttaaccttcataggcatcagctgtggcatttctagagtgggaataatactacctctctcatatatggctgctgtgagagttcagtgagatcaagtgaaagtcaggctcttagcagtatcacatagtggggcctcattgatagttattatcagaggaagatcagttatttgaaatggctagaacatcatcgcagcgtcagaaataccaggcgaaacatgaaatattcagaagtttgtctataaatcaaaaattggaaattttgccgtgtttgttcagtgattcttactgtttcctccttacaatttctaatcacagtgagaggtgacagcgtgctggcagtcctggcagcccttgctcactctccgcaacccctcggcctctctgcccactctggccgcgcttgaggaacccttcagcctgccgctgcactgtgggagcccgtttctgggctgaccgaggccggagccggctccctcagcttgctgggaggtgtgcagggagaggcctgggcgggaacccgggttgcgcgcggagcttgcgggccagcgcgatttcttggtgggtgtggcttccgcgggccccacacttggagcggccggccggtgccgctggcctcgggcagtgaggggcttagtaactgggccagcagctgtggagggtgcaccgggtcccccagcagtgccggcctgccggcgctacactcagattctccccaggcctcagctgcctccctgcggggcagggctcggaggctctgcagcccgccatgcctgagcctcccccaccccgccatgggctccttgccccgcctgagcctccctgacgagtaccgccccctgctccgcagcgcctggtcccatcagctgcctaagggctgaggagtgcaggcacacggcgggactggcgggcagctctgcctgccgcctggttcaggatccactgggtgaagccagctgggctcctaaatctatttggggacttgaagaatctttatgtctaggtaagggattgtaaacacgccaatcagcaccctgtgtctacctcagggtttgtggaggcaccagtgggcactctgtatctagctaatctggtggggacttggagaatcttcatgtctagctaagggcttgggaatacaccaatcggcactctgtatctagctcaaggtttgtaaatgcaccaatcagcactttgtgtctagctcagggtttgtaaatacaccaatcagcactctgtatctagctaatctagtgggtaggtggagaagttttgtgtctagctcagggattgtaaatgcaccagtcagcaccttgtcaaaatggaccaatcagttctctgtaaaacagagtaatcggctctctgtaaaatggaccaatcagcaggatgtgggtggggccagataagagaataaaagcaggctgcctgagccaccagtggcaactcgctggggtccccttccacactgcctttatgagctgtaacactcaacacaaaggtctgcagcttcactcctgaagccagcgagaccacgaacccacaagaaggaaaaaactcccaacacatccagcaagaccatgaacccaccgggaggaatgaacaaactgcggacacgtctcctttaagaactgtaacactgaccgcgagggaagtcagtgagaccaagaacccaccaattctggacacaatagcattccaatctgtttcaaaattggtgtcctctttgatagtggatgtgcttgtctcacccacagtagtttacattgctctctctgttgacatacttgaacatttgccagccttgaataatgtgtgcttccagctacttccccccaccccccaaaaaaaagcaatagtgaagctacattcccacttggttgaaatcaggctacagctgagtgctagcttaccttgtacatggagctttctccaaacccccggagtctctccctggccttcctgacttatctgttacgagatatttgagttgtaactcttagtttgttttttgatgatgaaccagcatttggacttaatgttctaatcagttcattagatgtttacagttgtaactaggggaaaaattctttaaacaggcagaccttggagatactacaggttcagttctagaccacagcaataaaacaaataccgcgataaagcaagccacaggaattttttggtgtccgtatgcatttagaagttatgtttacacagctgggtgaggtggctcacgcctttaatcacagaactttgggatgccaaagcgggcggatcacctgaggtcaggagttcaagaccagcctggccaacatggcgaaaccctgtctctactaaaaatacaaaaataaacaggacacagtggcgtgcccctataattccagctactcaggaggctaaggcaagagaaccacttgaacccaggaggcagaagttgcagtaagtggagatcgtgccacactgcagtccagcctgggtgacacacaagactgtctcaaaaaaaaaggtatgtttacactatactgtagtttattatgtgtgtcattggagccttcagcaagttgtcatcgttttgcttatggagggtctcaccttgatgttgatggctgctgactaatcagggtggtggctgctgaaggttgatatgactgtggcaatttctgaaaaggcagtaattaagcttgctgcatcattagttttgtttgtttgttttttaagactgggtctcgctgtctcacccaggctgaagtgcagtggcacgatcacagctcactgcagccttgatctcccaggctcaaacagtcttctcacctcagcctctcaaatagctgagaccattggcatgcacgccacccacacccagctgtagactctttcatgaaagatttctgtgtagcatttgatgctgtttgttagcattttacccacagtagaacttcattcagaaatgcagtcattcccctcaaaccctgctactgctttatgaactatgtttatttcatattctaaatccttttttgtcattttaacagtgttcatagcatcttcaccgggggtagtttccatctcaggaaactactttctttgctcatccatacaaatcctcatctgttcatgttttaccatgagattgcagcaatgcagtcatatctttaggctccacgtctaattctagctgtgttactgtttccaccacatctgcagtgacttcctctgctgaagtctcaaaccccccaaagtcattccatgagggttggaatcaacttcttccaaactcctgttgatgttgatattttgacctcccatgaatcacagatgttcttgaagacatccaaaatggtgaatcctttctagaaggttttcagtttactttgcccatatccatcagaggaatcgctatctatggcagttacagccttgtgaaatgtatttaaataataagacttggcagtagaaatcacttcttgatccatggtctacggaatggatgttgtgttagcaggcatgaaaacaacagtcatctccttgtacatctccatcagagttcttgggtgacgaggtgctctgttaatgaccagtaacattttgaaaggaatccttttttctgagcaataggtctcgacaatggactaaaaatatttagcaaaccatcctgtcaacagatatgctgccatcctggctttgttgttacacttaaagagcaaaggcagagtaagggcctcaggattttcagaatgatacttgagcattggcttcagcttaaggtcaccagcttcattgccccattgcccctaagaagagagtcagcctgacttttgaagctttgaagccaggcattgacttctccctagctatcaaagtcctagatggcattatcttccaataaaaggctgttttgtatatactgaaaatctgttgtttagtatagccaccttcatcagtgatcttagctggatcttctggataacttgctgcagcttctccatcaccggttgcagctttaccttggacttttatattacagggtctgcttctttccttaaacctcacgaaccgacatctgttaccttcaaacttttcttctgcagctttctcacttgtctcagcttttgcagggtggaagacagttaggtccttgctctgaattaggctttggccttaagggaatgttgtggctagtttgatcttctatccagaccatttaaactttctccatatcagcaataaagctgtttcactctcttatattttgtgtgttccctggagtaacacttttaattttcttcaagaactttttcttttcatttacaacttggttaactggtgcaagaaacctcaccttcagcgtagccttagcctcactaagcttaatcatttctagcttttgatttaaagtgagagacatgcaactcttccttttacttgaacagttagagaccattgcaggattactaattggtctaatttcagtattgttgtatcttagggaacagctggtcagtgcagtgctcagaacacataacatttattaagtttaccatcttatgtggagatggttaatggctccccaaaacaattacagtagtaacatcaaagatcactgattaccatagcaaatataataatcaaatgtttgaattgtgagaattgtcaaaatgtgacagagagatacaaagtgaaactgtgctgctggaaaaaaatgtcactgacagatttgctcaaaacagggtagccacaaaccttcaagttgtaaagcattatcgtatacgtgaagctcagtgaggcaaagcacaatacagtgaggtatccctatacttaaaacctttactctacaaagaacttagcagcaatcttaatgttttgtttacatttagaatagtgttattcatactagcatagttaagacactttctctgagacacaacagccagttcaatagaaggtaatctcaaggtgaagcaaaagtagtttaggagaaatgtgctgtgtttgaatacatcttattgatcaagtccacccccaaaataaataaatgaatgcatacacacattagtaaaactttgaagtattatgttagtacaaaagataattagcaattacatttttattcggtttttttttttttgctttttggttttttgagacaaagtctcattctgtcgcccaggctggagtgcagtggcatgatcttggctcactgaaacctccacctccctggttgaagcaatcctcctgcatcagcctctaagtagctgggactacaggcacgtgtcaccacacctggctaatttttgtgtttttagtaaaggctgggtttcgccacgttggctaggctggtttcgaactcctgggctcaagtgatcctccctctgcggctcccaaagtgctgggattacatttgtgagccactgcgcccggccttcactttcaggtttgattttgtgcatccccagagatgctggccatattctttggcaggtgtgtttagttagtattgtctttggctaccttatttttcttcagtaataatgaagaaatggtggttcaaactgttgtagctcagaaaggtgcatttgacaagaagcagtcagagtcccattgctccccttcccccacctcataatatttctctggctttcttgctgtagctcccactccctctcctattcttgttcgttcatttgcaattttaaaatgtgcatttattaatctgtaaaagctgtgcctaggatttgagagcaggtagtcatgctattgatcaaaaaccatggcaaaaaatatttagtgaggaacacaggaaaagggagcagagactaaagaaaggactagtttgggagtttggctgggtgatagctaaggtctttctcaagctgaattgtaaaatagtagatctggaagggggcaaagaacactaactttatgcagccctctcctattgcatgtaaagaaaatgagggccaggtaaattgatttgtcttaaatgtacaagtcagtgataggtgccccacccacccgtttcaaattctttgctcataagattggatctgttctctgttttatcaaatctttctctcaagaaaatatgtataacataatgtcacatattagatactgtgtgtgaaagtgtctcacacattgtaagtaggaaaaaaattagttgactccattagctgactaattcttcactaggtaaagttcagtcagggttagcagcacattttgtattccttatataagaggcctctgaagacagaacagattcatctgtacctagcataatgcctccctagcctctggaatgtgcttaaaaatgattacatgatgaattatacatattaattatacttcagattctctttcaataagataagggcttgaagagtaattttctagtgttcattaatacgaatttgtgctgggacatctattcatggttaggtggttttgggactgtgactgggtttggaagtacatcacaacataagactaattgcccgagatacagatttcagctctgtttacatgttgactcgatttcaaaactacatcttaccatagaagtgaaaaaaaaaaaattcaagcatgttctattaccctaaataagagctgaaaagatgaatgttgaccaggttgcttatgaatatacattctctaatgtggcgctctttaaacttgggcatgtgaaaactgtccagtgggtacgggagaacacaaatagcttaaagggaatccatttccagaaactcatcttctgtatgtacttctccctaaaatggatctacctgtgaattctcttgtggtcaagccttcaggctatttctccttttgcatctctgcttaacaattgccctttgccacttaagaaaaaaaagtcataaccctcacctataaccttatttggtacatcgcaaggtgtaaggacctccactggtgcggagggggcaaaaaaagagtcaattccaaatcctagttttggagaagcttcctatagtgagagatagtgcagtttttcaatattattttaaggcatagagacgatagtagaagttgaagaccattgcaaagtattttgagtttttctaaccattttgatatttatctaataactggttttatcattaatttttaaccagtgtctttttcaaacatgctctttctctgataacactgccagagtggtgcatatttaattctatacttaacagtctgcttgatctaagtatctgcatgagagccagcatagcatttgaaagagagaattgtggtacggatggtgtcataattctttctgagtacaaattccactgcggtcactgtcagtttcactgaaagtggaagctgtgatatcctccatacttttcataatgattcaggaaccacagagaaaaaaattcattggagtttagagatgattgaactaaaatacacgaattccatcaactgtgcaaaatatgttggagagagaaagagagactcacggttacacaatgcatggtaatgtagaaaagcttcagagagccctgtgtgggctggcaatgacagcactaaagccttgaataaaattgcattttatcgtctctgagaagcaaccaaaagtgaggaacaacgacttaaaattaaatttagaccagaatatgtttacctctgtaatttaagcaattttctttgctttgttattcttaaaaatgatgatcttcaaattcaaagagtcattctgtcctggctagtgtcgagagaggtatgtgattgtgatctggctctggggttaagttacagaaattacagttagataaaagattggtaagcttgcaaagcagtgattttttaaccaaggcttccaatcagagttacatgtggagcatttagaaatattcatgcagtttcctcgtccaaggagctgatgtggtagatctaggacagggcacaataatcagtgtttttaaaaattcctcggttgattttcttgtgcactgtcacatctttagataagaccactgtggggaaagactgtttgtcctagggactgaccctggaactatttcctgaaatccacctgtgggtatatcatcattctttgctaggtatctgctattctctagtacgctagagtattagtttcctcgggctgctgaaacaaattaccacaaacttggtgtcttaaaaacagaaatgcattctcacaattgcagaggccagaggtctgaaatcaagaggtcaacagggctttttaccctctggagggttcaggggaaaagtctcttcctcgcctcttctaacctctggtggtcgccagcattctttgacttacgtgtgtattactctaatttccatattcctcttcatgttgccttcttttctttcttaaatctccgtctgccttctataaagacacttgtgattgcatttagagcccacccacgtacgttccccatctcaagttctttaacttaatcacatctttaaagtttttgccatataaggtaacattcacaagttctagagattgggacctggacattaggggtgccattcttcagccttccacagtgagttatcgcttcactgtatgtattcatatgggctgccctgtcccattaaggtccatgtggtaactttctccacttagctctaactaccagtccatagcaatgtttctccccaaaccctgccctcttgcagctaggccagataacccctcacatagctggagataagttgtttttctgagccatagactatgcctccagttttagccattctcatgacaaatgcctttggtcctaaatggactaagagtataggatcagtgcagccagcccatcatcctcaccaacaaaggcgcttcaagcatgtgtcctagcaacggtggctctttaaagctcatcttttaagaatagaacattaccagattatttgaatatattctaagagaggcacaagtcttattatcttttcaaatgggctctgactttggccaggcatatacgatgctataaggtttggtcttaggaggagacaatgtacttagttgatgtaaacatgaagtgttatttacttgagtcagtgtttgtgaaaaacaagttatggaatgtggagagaagttaattaacatgggatttcatttcctcatccgtataaggaaacctttgtttcatgatctctgagttcagttctgaaatcccattttgttggttcttcccttaccatcagaaaggagaaataggtgctagtgcagatgcattttagaggagatggcgagaggctcatgaatgaagaccctgctgaagtttgagttgatgaatattcaatggcattaatttgttctattgtttaattttctctagtagtgctgaattagtcacatacaaataggggaggctgcgaagttcaggaggattattagtggctaggtcagtgctgcccttcattaatacccacctccccacaaccccctagtccccttggcttcagagatgggccgagtcatagaactttctcctagccacgcagatctgtccatgggaaggataggtgaactgaacctctactgggaactttcatactggagctgggagaaataactagtttgttgttgttactattgagagagacaagctgtgaaaaggtgttgcttgttttggatgtgtttcttgtgtagtggagaaacaaggactgcagatggttggggtagaaagaggcgaattgagatgagagagaaattcctggatccctgaggctactagagcatactttttatgatctgactacattaattattaggcctccttacccttaaggtagtgtttaggtatttgacatttgaaagtaaaagaaatcttaactaatctgtaggattttcatacggagaaatcagagtaggattgatcaagagttatataggtgtaaccacagctacttagaaggctaaggcaagaggatcccttgagcccaggattttgaggctgcagtgagctatgactgcaccactgtactccagcccgggtgaccaagcaagaccctgtctcaaaaaaaaaaaaaaaagaattatatagtatctattaatattttcatgtacaacagcagaacaaagaaatcgaagatactaactagactggtggaggtgagagactatgacgtctaggctacacgggaaaggaagtaatgactgccaggttagagataaagaagaatcaagggaattcatttcttaactaggctgagtagataaaaagatgggaagttgtgttgagagtgtatttaagttttggatgcatttgtaaagcgtcttccttttattaagaaaaataataattgtgataaagcactacaaagaacaaggaaaattctttgcaattttgcaattgaaaagaatagggatgacacccactgtctggattcggcatgctacaaaaaaaattctattctatgttgtttacacagtgagaggacttgacctgcaatactgcaagtctgtggaattcggcaagatgatttataatagattatcttcatgagatatctggctgattgaatagcaagaatttttaaatttacaattctacttctctttgaacaaaatattcttgagggaaaaagtatttgaaaaaatttgtgctagaacagaaatgaatgtattagaaaaattttagctgtttagcggtcatttaaactttctacctttatgaacagattttttaaaaatctttgccacattttgaattactctgggtaatattgagtatgatagtagcatctaaagaacctttaatgatctgtctcttttcatttgtagtttctcagcccactgttacttgtgggttcaaaatggctcatgcaagtaatataattcatttaaaaggcgtttatccaacgaaagccctcctgagacttgagccagttttcaactctctctgcacttccataggtgttcagcctcctgatacattaactatatcatagattggatctcttcagtaatcctgagttcttcaaaacaaatatgcaatttatagcatagtctttgtgcctcagtatactccgtattttaattgtacgttctatcccttttgtgtttgagaatacctatcatgtcctgaaaaatataaaatgtgacctggtttttattagctactgtaatatttcaatagttgaattgactatgaagccacaattgagaactttcatgaagtttgtcaagatactggctaagaatacacgtattgagtcgtaaataatataaattctacaacttaaataaatttgtactgaatttggaagtattttgctgaaaagtgaatttactattggtgtgcattgtttgcttacacacatgtaaacacttgaatgagacaatgttaagggcgaaaggatagaaatacaaggcagttctgctctgctgtgctgcttggacaactttctgaacctgccttttcttgtttgaaagacaagaggttagatgacatgtgatcccccttttttctatctcagagtaaatgaagtcttggctaagccttcaagttctaattgatccaagtcattctttgaggaaaaatgttccaacatcatcataatattgttatgcataccgttcttttgttaaatataatttgctcttgtggttttgtaccttagaaatgcatttgtgtgttccttataacatcttacttaaaattcaaaggtaaagccagacactgtggcatatgcctgtagtcccagctgttcaggaagctgaggcaggagaatcacttgagccctggagtttgaggctgttgtgcactattatcatggtcatgaatagtcgctgcactgcagcctgggaaacacagcaagaccctgtgtcttaaaaaaatgtttctcggtagttggtatagtggaacaagctgactacaaggacctttgtaatgctagagctgggagaatcagggtagcagtcttgtgctgactttaccattattgttaccaagggtctaaagaagttttttatccaatctgccacaaccacacacacccaaaatgtaatacttaactgtaaggcagaattgggatgttacatttataataaaaactggattaagtcagtggtatcgaaactctaaaactatcctaagatgcttttccatgtctggcttcagtccccctaccaagtatcttactctttaatttgccatgaaaacaattctatttctttcattaacgaaaaaaaaaaagcagccagacacagtggctcatgcctctaatcccagcactttgggaggctgaggcaggtggatcacctgagatcaggagttcaagaccagtctggccaacatggtgaaaccccgtctctactaaaaatacaaaaattagccaggtgtggtggcacacgcctgtaatcccagctactcgggaggctgaagcaagagaatcacttgaacccaggaggcagaggttgcagtgagccaagattgtgccgttgcactccagcctgggcaatggagtgagactccgtctgaaaaaaagaagaaaagaaaaaagtatgagtactccactgtccaactgagtgaaactacaagaccatattttcaatatgagaaatagcatgcacagtgtaattttaatcacatcctaatattttactataatgaaatgtagtacagtactgtgccttattgataaaagacagttataactttgtgaaagtttctttgtttcatgaaacgttcgttgttcacccaatgctcatttgcctccccatgtattcttcacctttctaaaagcaaggtgactgacaaggggggcttcgtgcctatccttttatgaaggaattacttggtcatttgctgaattcaaaatgtggaacagaatggaaagaataatgtgatctcattttctctctttacaggctctgtacaactcaatcaagaatgagaagcttgaatgggcagtgtaagtgtgctggacgtcagccttttaataatgaactactcacttttttcctactgtctttatgccttggaagtgatcttagagaaggattaaatatgcattgccaattctcattttacaccaagtgtcttacctactttgtggctttatacaagtaaacccagatacaagtaaaacctatttcggttttatacaagtaaacccagagtatcctgtggttttttggtactcagtgtgttcctattctgcttttaaaatggttgctgtacctgtaggtaattaattgtcttttaatttttttttttttttttttgaggtggagtctggctttgtcgcccaggctggagtgcagtggcgcaatctcggctcactgcaagctccgcctcccgggttcacgccattctcctgcctcagcctcccgagtagctgggactacaggcgcccaccaccactcccagctaattttttttttttgcatttttagtagagacggggtttcacagtgttagccaggatggtctcgatctcctgacctcgtgatccacctgcctcggcctcccaaagttctgggattacaggagtgagcgaccacgcccggccttaaatttatcttttaaaaagtaacattctaaaagaaaaatctgctgatgaatagtgtgtattgcaaaatgtaatacaaatggttttggtatcatccacttattttaattatctccttcctatcatcatagatcatggctttccaggtttatttcctatgatactaatcatactaggacactgatagatactaagcacaaaacaacaacagcaaccaaaaaaaggttctctgaatggaataagcttgggagatgatggattgaataaagctattttatttaaacttcagaacttctaggagcttatccaatgccaatgtgtgttatcagtccccaagagaggaatagaatgtgtaatgtttcctgactctctttgacagtgacatatagtgtttcagggtacatactttgagaaatactattaaagatgagctacacctaggtctacgtagaacaataccactgttgttaaaatttccctaatcaatatagcagttcaaaattttaatttttataaaattattatggaagaatatgaaatttttaatcacattaccaggaaattaggtcaaaatgtgttctttgtaattagaacttcgtggattttattttttatttttactaagtattcataagtattgttttaccacgtgacctaacagagcattctacaatgaactcgggtttacagaatcataacttgggagataaaacttgttatgttatctgcacgttggaggaacatgggttaatagttgactgtgtattacatataatgtgcaggaatttatttttgaagtatcagcaccacttgaattgcgtctactcactgtagagtcatggtcctattgcaagttagggagtcaaaagttaagactttaatatttgcatatatatatatatggcttatgtgtctgtatgtatattcatgatgagactcatttaaaggcagcgtgccatttcaaggaaaactgatcattaagaattcatggtctgctatcaaaggtgatcattcttctttaggcttatttctcatgaacaaaagtgggtttcataggaaaattttgtgaaggatatagtcagaatcttgctgaaatgcaaaaaggacatcctgacatatgcagaatatgtagtctagagaaaataaataaaaatggcatcatcatattcactctgggcaagagaatacattgaagattcttttatgaagttattttaaaaaacaaatacatatactcttgaggacctgttttgtaaatctaggtttttttttttaatttgttacagcagattttatttattcatttataggtagtcggagtttgatgcaagaaagctatatcttgcgtgttacccaagggtggaggggcgggagtttacccagtaactggtttcttcttgtgaagttagcagagcatcttgttcagaagcctggatttcagagtcagataaattttggtgtgaattacagctttttcatgtagtagctggttcactgaccaagttaacctgtagtcctcagtttcctcttttgcaagactgagcaaatattgagtctcatgtaaccttcaggatgacactgaaatgtttgaaaacactgaacataaagcaagttgctcttcaattgatgcctgatgctgtagctttcaaagctccaatttctttttttttttgtctttttttctttttctctcttgttcatatgcatatacatagactacatttttatacattgtcaagaattagaagaagacactatagtggttatcgtataatttctatcttcacctataaaatgaaggaattggatgaaatgatcacaagtattttttctagttctaatattctgtaaatttctgagttttgccatatttcagtgtttcctcctgtggaagaagtactgctctatcaagcagatataaaacaaagggattatgggtcaactaagtcttggaatgaatgctagctcaaacaaaattaaacagatctctctgttatcatcctgttcaatcaacgtacatcttgaatttctgcaggagaaatttgaatttaaaaacctgatgtacatcttgaatttctgtaggaaataaatggccaataccccaatttattaaatcactgaatcttatttttgtcttaaagcaccttttaacatctactaaaactggtgctttttatttagaacacacttctgagaacactgacatctatcagtgtatgtgatcctttagcaaaggagctaagcagctgggcacggtcgctgacacctgtaatcccaacactttgggaggctgaggagcctggatcacttgaggtcaggagttcgagaccagcctggccaacatggtgaaacctcatctctactaaaaatacaaaaattagctgggcgtggtggcgtgcacttgtaatcccagctactcaggaggctgaggcgggagaattgcttgaacccaagaaacagaggttgcagtgagctgagattgtgccactataccccagcctgggtgacagagtgagacttggtctcaaaaaaaaaaaaaaaaaaaaaactaagctttttccttgataaaagtgtatgtacatggatataattatttataacactgtgctctcccgtttctcccatacctctctaactagactttctctgacccattttcctcatattatcccttagcgttagatggacactttgaattgtcttcttccaatgtagtctcctcctcagcaattgcaattcactcttaaaacttcttctgccatttctgtaaaaattcttcctatatatatatacagctctgacctctttcccaagtttcaattcagtgtttgcattttcctgcaggatgtttctgctggcacttagcgctcatcgtctgtctccaaacttgtcgtgtgtgctccatttctattaatgacaccagcgtttccggcttacctggattttagcctttacatcatctttgacaccctcccacaccaccacttcgaacccctgcagaaatggctccaaacagcatctttcctcttcactcctgccattcttttgtttttcaggcatttatagtgtttgcctcctcaacaaggccttctgtctccaatcttccctgtactttaacctctgtgaagttcctatgtgctgtaaaactttaattaggcccttcacgttctgccaataattgattttgttctccattcagtgttcgtgaagtcacctctgctaggaacctgtatcccataatcattttatgttcaaagcctatcatccttcacagtccagctcctattccatctgttttcttgaagttttttctgatcttgctaaccagaagtatgatctcagccttaagcttccattttactttatctgatgacaccagcagtttctacaccccattatggttatttgtagtaatgtgccattagattgtaagctctttaaggaaatgatacatgtctggatttgtccctttatctcctctgttgctgatcatagtgtttatatgtaatgaaggctccataaaaggctatagaaaggatgttaatggtaatgaaggaaccacatttcttaaaagataagcctacaatgtgtagtttagaaaatagttacaggaaaggtggtgatgctacaaagtttgtaggataatgcatggaagacttgcgcaggaggcatcttgatgtggatgttagaaccttagaggaaatcacgatagaattattgagtgttagaaccggagaatgttataactgttataaaccttataggtttttatatcattggttttctgactgggttcagtgtaaccttgggttacagggagatgccttggggccttacctgggagtgtgactgaaaattgttggggacccagttctgcttccttaagtattatgcctagttcagctgatcaaaacagctccacttttatctcttttgaatatatgtatagggttctatttcatatttttaaggtatatgttcttgaaaaattttttgaaaggtacttacgtagtccattgttgttactttatatatgaggaaaattaagtcaagaagtgttcatcaataggtccaagtccagtatggtgggaaggccaggattttccccagctgttatggcctcctatggcaccaccatgctgcctggcatctctgtagccaccccgtcttataaagtctttgaagagcagagagtgagtctgaatgtttctgtgctagcctttgatacagtgcacattaagagaatgttgtattaatttgctagtctcattaaatgctcatagaattactagagtttttccttaagttagtagcaaggatcatttatttattcatctattctgcaatctctatccagcttctcctgtgcctggcccagtgctgtgccctagatacaaatatgaataagacacagatccttgcctaatgagaacacaacatgagatttaggggagagggaggactgtacaaagataaaaatacaaaaactgtaatgaagagtgcagtgagtcaaattgacttgtggaaggtctctgctacgtcatataggaccatgaccatttgcctttccaagttcctttgctcaattgttcattattagtgaagcatctatttgttgacctacttgcatcatgcagcctgctgataatttggggagaacaaaactatataaggcattgaggcatttttcttggctttaaaaaatttccagtctaagtgataaacaaagtgagtaattactctttgtgattgggatggcgtaggatgaggtgagttgaggtggatatgggagtttatatcttatgttggaattgtttaaaatgtatctgcatgaggatcttcagaaaatacaacgattaacacaaataggaaaataaaataagttcagtattgtctattaggaaaattaatgttcctctctttcatcctttgactttcatgtttattgctgctttctacaacagtgtttacaaattgtaagaaatctccctgttttagtctgttcttgcactgctacaaagcaatacttaagactgggtaatttgtaaacaaaagaggtttaattggctcacagtcttcaggccgtacaggaagtatgatgctagcatctgctcagcttctggggaagcctcaggaaactttcagtcatgacaggaggcaaagagggagtcagcacttcacatggccagagcagggtggggtggaagtgccacacttttaaacaaccagatctcacaataacttactcactaccatgagaacagcaccaaagggggaaatcttcccccatgatccaatcacttaccgccagatcccacctccaacagtggggattacaattcaacattagatttgtgtgggagcacagatccaaaccatatcattccatccctggcgcctctaaaatctcatgtccttctcacattgcaaaatacagtcatgccttcccaacagtccctcaaagtcttaactcatttcagccttaactcactcttatctgagacaagcctagtcccttgtgcctatgagcctgtaaaattaaaaacaaattagttgctcccaagatacaatgggggtacaggcattggctaaatactcctattccaaaaggaagaaagcagccaaaagaaaggggctacaggcactgtgcaagtccgaaaccccggcaggacagtcattaaatcttaaagctccaataataacctgctttgactccatttcttatattcagggcacactggtgtgaggagtgggctcccaaggccttgggcagctctgcccctgtggcttttccagagttcagtccctgcggttgctctcatgggctggcgttgagtgcctatggcttttccaggtgcagggtgcaaactgctgggggctctaccattctggggtttggaggatggtagccctcttctcacagctccactaagcagtgacccattggggactctttgttggggcaccaaccccacatttctcttctgcactcccctagtaaaggttctccaagagggttccacccctgccgcagatgtctgcctggatatccaggcttttccatacattctctgacatctaggcaaaggctccgaagccttaactcttgcattctgcatacccataggcttaacgccatgtggaagccaccaaggcttatggcttacactctctggagtgacagcttgagctgtaccttggcccttttagccacagctgtagctagagtggctgggatgcagggagcagtatagggcagtgaaacttcccggggactggcctatgaaaccattcttctctcctaagcctccaggcctgtgataggaggggctgctgcaaaggtctctgaaatgcctttgaggcattttccccattttcttgctatcagcacttgcctgccttttagtaaagcaaatttcttcagcctgctgcaaattttcacatggccaggctgcaaattttccaaacttttagatataagttccagttttatgtcatttatttgctcgcacatataagcataggttgttagaagcagccaggttacttctttaatgctttgctgcttagaaatttcttctgccagataccctaaatcatcactctcaagttcaaaattccacagatccctagggcaggggcacagtgcctccaagttctttgcttccgcataacaaacataacctttgctttagttcccaataagttcctcattgccatctgatacctccacagcctggactttattgtccgtatcactatcagcattttggtcacaacaatttaagaagcctctaggaagtctcaaactttccctcatcttcctgtcatcttctgagccatccacactcttccaacctctgcccattacccagttcccaaagttgctgctacattttcaggtattttttatagcaattccccacttcttgggacccatttttctgaattcgtttattctggcactgccataaaggatacctgagactgggtaatttatataaaaagaagtttaattggctgatggttctgcaggctacacaggaagcgtggtgctggcatctgctcagcttctggggaggcctcgggaaactttaaatcacagcagaaagtgaagggggagctggcacttcacatggccggagcaagaggaagagagagagggggcaggtgccccacacctttaaacaaccagatctcatgatgacttaactcactcactcactatcatgagaacagtactaaagggggtaatgccattatgatcgagtcacctctcaccaggccccacattcaacatttgggattacaatccagcatgaaatttgagcggggacacagatccaaaccaaatcactcccttatcctagtttaaaaaaaaaaaaaaatcatgtattggctcattttaataaagtcagccaaaaaaaaaaaaaaaacagttttaaataatgaacttctggattccctctgcacttgtgcaccctccatgttttagttacagcagcattggccttgctttgtcatttagcacatttgttctttttaactctggataagcattttacaactttgcatcgtggaataatctttcctgcaatttcatattgccctacaactcattttataacaataacagtttaaaacatttgctgtatttgctaataagttaaactatttcccatctgccctcacatattaaattgttctggctaattaggtgaggtggtagcacattgatatctttctgtccttccagtcatgtgttatgatagccctgagctttagaaagtgtggttttaaataccaacagtttgtagtttggcttttcatttccttgttgcaaatttaagtcatgactggtcttttcaggaaatcagtgctgcctctttgttggctgatttgctgaaattaggaagtagagaaaattttgcaaagatttcctcccacttctttgccattatgtttaacactgcccatgaaggtgtgagtgtgtgcatgtacatctctgtgtgtattcttgggggatgatagaggcaatgggattactattacctgttttttatgtgggtaccttgattgttcattcaacccaatggcctaaatatgaaattggtaactagttccaaagtctctttgttttgtgaactcttaagaaaactctttttccgagtaaagaagccttctagggctcttttactttcattatttggttcccttatcatattttacttaactcagcattgattctcatttcattttaggtattaatacatattaattaaaatgtaatctcagttgtttctctgtgagagttggtaatctcataaggacgaatagttttcttttcacccaagagtttttctattagtttagactgatttagttgtaccaccttacactttttaatataatttgtcgcctttcatttaagtttttcattttttttgttgtagtgcttcattttgtttatttgccaacattagaatcagccatgaagaaaagttggaatcccttgtgtgtactttttagaattgaacttacatcctaatgaaaagagttcttcctaattttagttaaaatattttttaccttgacataaaattatttggttttctttcaaaaaggcaactcatggtaatttcctttttttgcaatgacttactacattaaataactgtatatccttaatccctagtgaatatagatatataaaattgttaatcagagtagtgtttcttaatagtagatgtagattaatgaaggaaaactttcttgctcgaaaaagttatttgggatgaagacatttatgagggaactttaaaatgaaagtaattttcattttaaacttcaatgtagccatctgtaggttggcaatcattactaacaagaaaactaaggcaagaagaagttgctattgtgcctcttgaaatactagaataacattctcagtgtcattgctgtctatgggactatactcacattcctaaccagcagaaactacatcatactggactcttggtaaaatattaagctggacaatggtatagataaaacatatattttaaatatataaccaaaaatttaatttgagtgtgtgcagagagaggtagggagcttggcatttagggtcataggtagagacaactcaccatggaaaaactgataaaattatttgcacgagatatttgactacaaagaaggaataatgcattcatttattgttgggagaaacagaaggaataaaactcagttctccacttgaggtgctcatacaattaaatgacttttctagatactcattacacctcattgaaattctagaatgagatttagtgttctcattgtcattgctctctgtttcactgtactcaaattcctaacatggcagatactgtgtcacgctggactcttggtaaaataataatgctaatgttagtactagcataacaaacttacaagacaatctatacgaagaataactaaggttaaatctatatatgtatagtggttatgtaaaggatattattggtttgattgttctatttatattcagcaaagacaccctgactgtaagaaaagaaacagaaatgccatagttatgaaaaattgaccattaacttgaaggaaatattgaactaaagagttgagaccacttaattttgttagctattgattattagagttttctacagtaaagtatttttaaattaaaaaattgttagctaaaaatgatattgaacatgaattaatcttctggattttggtatttaaaggaaaaagattttcagtggttagaattaaggaagactcttgctatggtgtcagcatgtccccagagttcatgtgctagaaacttaatccccaatgcagtgttaggaggtaacacctaattagagactgttaggtcataagggaaaagggctctgccctaattaatggattaatgttatcaagggagtgggttagttatcgtgagagtagttttgttttaaaagcaactgtgatccccaactcgctctcttgcgctttcttgaccttctgccttactaggagaagggcagcaaagcacaagagagcaggtgggggttagagaagaccccagcaaggaggccctcatcagatgcaggccccttacttgactttgaacttccagcctccaatactgtaagaaataaatctctgttcattttaaattatgcagtttgtggaattctttcacagcaacccaaaacagactacgacagaagattggtaccgagaattagggctgttgctataacaataagctgaaaatgtggaaggggccttggaattgggtaatccacagaagctgggacagttatgaagtgaatgctagaaaaagcctagactgctgcaaacggagcattgtgggcagttgggtgagggctcaggagaagacaagaaatttaaggaccatctgggacttcttagacattacttaagtgatcataattagaatgttagtagaaacatgcatagtaaagtccattttgatgaggtctcaggtagaaatgaagaacaaggtatttgaaactggagtaaagactgtccttgtaataaagtcacagagaacttggctgaattgtattcttgtccaagggctttagggaaggcagaatttatgagcaaggagctaagatatctggtgcaataaatttcaaagcaaaatgttgatggagctaagtagctacttttaaccacatacagtaagatatgagaggaatgacttaaagatagaacgataattaaaggagaagcagaagaaagattttgaaaatgttcagcctggccttacaaagaatgataaagcatgcttgggaaagcaaaccacagttgtggccaagcaaccatttgcaaagatattgttatggatacaagagatcaagacaatgggagaatgacccctgaaaacatttcagagatctttgaggctgcccattccatcacagtcccagaggtgtaggagggcagaatggtttcaagggatgggcccagggtgctctccaccagagccccctcagttctctgctccccacattctggcacagcattccttggctaccccagccgtggtgtaagccggcctagctacagcttagcccactgttctaggaaatacaagccataaaccttagcagcatccatgtggtgctaattctgcaggcacacagaatgtaagagctgtagaggcatggctttctttacctagatttcaaaagatgtgggatattccatgacagctgctgggtcgtctaagcccagtgaagtcataggattggggctgcctgaggccttgggggcccaaccccaattccagtgttttcaggatttgggacatcaaaggaaactattctccagctttaagtcttaatgttgttttccctatttggttttggagttgggttttgttcattcttttttcttgcctatttctcccttttggaatgggagcatctatgtctgtctcaccatagtatttgaagtagataacttgtttgatttcacaggcccacagctggtgggaaatttgcctaaggatgaatcatgcctcaaattgacctgtatctgatttaggtcagagtttggacttcggacttctgagttggtgctagaaagagttaaaactggggtcactgtgatgaaatgaatgtatttcagaggccacagacagaatactatggtttgaatatgtcccccaaccattaggcaaggcttcataagaggtgcttaggtcatgagggctatgagtggattaaggttgttactgcaggagtgggtttcttataaaaccaagttcacagccctcttcctctctcacactttcttgcccttgcaccttccacaatgggatgatgtagcaagggagtccctcatcagattcaggacccttgactttggacttcccagtctccagaactgtaagaaataagtcaccattcgtgataaactcctcagccagtggaattctgttttagcaacacaaaatggactaggacagctctctcatatggctctgtgaaatgtaattttatcaagaacctaaagcatatctcatacttaatctgagctcacacttaagatttaagtacttgttttctcagctgaactcaggtgtataggaaactggaaagatttgccacccagttcttagctttaaaaggccaaatttttttaaaaaatgacaatacattgtttgcttcatgtctaagtggcatttctcttgataatgagattgagatggatacttagaaattttaagggttttattgtgaaaagcttaaatatttctaaatatgatgaaagttatgtactttacaaatattgttatcttcatttcacattatcttcagaatattcagagcagacaggttggtgagcagatggaatgtgattatgttagtagcctacttgtcctaaagcatttttagaatcactgaggagcaaagaattatggaggctgggatgtaaagaaagcatttttcttagtatgctaaggatagagaatcttatatcctctatatcaattgctaagtgcttgatgtttgatgaggaatgatacaagatgatatataataaatatagtttctgaatgatttttaatgtgtatatgaggagcattttagacagtagttgtttcattgagcatttatgtactcgtacattataatttatacatatatgtatattttttaaaggtgagaaaatttagccagatcaagaatactcaaggaagttatttttagttgccccttaaaaattttccaatagatcttttgggaatacctaacatgtggcttgaccccagtgtattttcagaaacttttttaaccattggttaagtttgtcttggtttggaaagcatactacagtcattgtacatatggtcagatcctttatttagaaagccaagttactagcctacatctttctcatatctggcagcatttttcttggtattaaaaggctagtgatgaagcctaacatttttaataaagcatagtctcttttttacttttaggattcctgtgtcaaaataaggtatttttagagaatagaatgcaattcatattttcagcagaattttaaaatttaactacatgctttcttttttatttttggtaagtgacaaagatccattttagactcatcctgcctcgtggtataatgtgatgtggtataatagaaaccccatgataactcagcacattttttataagttcattcttcgctttattttcctgcaatcatctgatcacagtattgagatgtgagccaccttagtgttctgcccctgcattcaaccaccacctttattttttaaactgctttattgaggtgtaatttttatgccataaaattcacccacttaagtgtaccaattttatgctacaccaatgtttgtaactttgcacacttgtgtaacaaccaccgtagtttatcaccccatttccatcacccaacaaggatttcttgcattataatttagcatgtttgatacagactcttccctcctctctgatcctgtactgctttgtacacagctctgtggagacatatagtattttataaaaaatgttttagccaatattttgtgtatctgtttcccctactggatgatgaacccctcgaggggtcttaatcatcatgatatcaggactgcctagcacacactgcctggcaacttagagctccttcccatcactactcagctggccctgatgcccagggataccagttcccaagcattgcttcctggaggagagcagggacttggtaacatctagcttctaggctggttgtaaggtgaggaaattaaattacagggatcatggtaatgattgccagtacaaggtggactttgggacctgatttataacccctacccttctgtaatgttctggctagaggagtgtatacacagagcagagagctgagtgaaatgaagtcaagcctctgctgtgtaatgcagagtgcaaggcacctgcagaaagttatactggagaatgtgactgggacctgagtggccaccaagcctgctgagctccccagcctaaccatattacaggctgtgaaatcagaactaaaggagcagaggtgagctctgccccactgggtttgccacatagtaaggcaaaagggatagagcggtttacctgatgccaaagaagtagtgggggcaagtgtcgagtttctcttttgagacactcaaaggtaggtcagtggggctaattagttctgcttcctaaatagagaggaaagaacagggctttcttctgccatcttccctccagtcttactgatgtattagtccattctcatgctgctataaagaactgcccaagactgggtaatttataaaggaaagaggtttaattgactcacagttccgcagaggtgggaaggcctcaggaaacttacagttatggcagaaggggaaggaaacacgtccttcttcacatggtggcaggaaggagaagaatgagagccaagtgaaggtgaagggccttataaaaccatcagatctcacgagaacttaatatcacacgagtagcctgggggaaactgctcccatgattcagttacctcccactggtccctcccatgacacatggggattacaggaactacaattcaagatgaaatttgggtggggacacagccaaaccgtatcacttaacaatgtatgcagttttgttgttgtggagggtttgcatggtaaaacttggggtacctgctccatatcttaggggagaggctttttgcagtatttagcctacacttagcagcataggtttccatttagggtcaatgctgtggagacacatggaatatcctgatcttttgttgtggttttgtattggtctatatcaacggagttctacaatcatgaaatactagaactagaatggattcacgaccacagtctgcttccaagagctgttttttgaaagtgaatggggattccagagacctttctactcatcctgggctcccactccctggacaggctttgcatggcttgtatttactgacttagagcaagcttcaaattttacatatgaggaggctgagatctagagagatgctgcagcttattcaggatcacagtgaagtttatggaagagcaagtactgagacacagttgtcccagtttttcttctctagggcacactcccatctgcaaaagtgataaaattaatctgaagctgtggtgaggtagcatctaagtatatccatttcctttggctgccataacaaaatgccacaaatgggctttaaaaacccagatttattgtctcatggttcttgatcactgagatcaaggtgaaaatagggttgtttcctcctgaaggccatgaccgggagtctcctccatgcctctctcctagcctgtggtagcttcagggtcttccttctgtatgtgtgtgtctgtgtccagatttctttctttaataaggacatcaatattgttagattagggcccactctttaatcatcttatttccaaacaaggtcatattcctaaatgctggaagttagtactttaatttctcttgtggggactgaattaaacccataacactaagactagagcaataaaagggaaatggggcacaatggtggactaggaagctccaggcccttgttttcttagggaaacattccataagcaagtaagaccatctgaaagaacttcacatgtgctctgaaaaccaaagatgtacagcaaccaggcaaactctcaattaaaaaaaaaagccacatttaaaacagtagaaaacttcaaagcaatgttatttgcccttacccgactccctccacagcatggtatagcatagtccttaggaagcagcccaattacttactccctctcttgggatgcaaggaagagagtgggacttgataacaatattctggcctgtctgtaggctgcccatgtgactggtttctattttgcctaaagtagggatcgaagaggggatggtgtcatagtttggatttcagactggcacaagccacggaagggcagtggtcaatgccatggcacctgattctgtagtttcccccattatatattcttgaaaccttttccagaaatccagttgaccttagctacttgggatttttttctgggctttctgtttttataccagtatcatgctgttttgattacagtaactttatattttacagtcaaaaaactatgcctccagctttgattttttgctgaagattgctttggctgtttggagtagtttctagtttcctacaaattttagtattttttctatccctataaaaaatgacattggaatttggttactaggtatattttaacaatattaattcttccagttcattaacatgggatttttttctccattgatttgtgaatttttcaatgttttacggttttcagtacacagatcttcacctccttgcttaaatttattcctacttgtttttttttgtttgtttgtttttaatgcttttggaagtgggattgttttcttaattctttgagtagttagtgtacaaaaatgctactcattttttgtgtgttggttttttaatctaaaactttactgactttagcagttctaacagttgtcagggaggggtagtttttacggtttttctatatataagattatgtcagcatcagagacagtcacttccttttttttttttcttgcctaattgctcagcctaaaactcccaaaactgtgttgaacaaaagtggtgagagtgggcattcttgtcttgttcatggtcttagaggaaaaacattccacctttgactgttgagtatgatgttagctgtgggctgtaacagtactgaatcttttttttttttttttttttgagatggaatctcgctctgtcgcccaggctggagtgcagtggcgtgatcttagctcactgcaacctccacttgccaggttcaagcagttctctgcttcagcctcccaagtagctgggattacaggcacctgccactgcagtgggctaatatttgtatttttagtagagatggggttttaccattttggccagactggtcttgaactcctgaccttgtgatctacctgcctcggcctcccaatgtgctgggattacaggcatgagccaccatgctgggcccagtactgaatcttaatgatgataatagaataatcaatttgaaggacagaaatctttcttccagattgattctgatctatgagagactggcagtactgtatttttatatttttattatggtattggttgtagatacaaatagtttttcattgtaaaaataaaatatagaaactagaaacaactcagtatctttcggtagatgaatagataaacaaactggcacgaccataaaatgaaatggtactttacaatggtagggaacaaactatcgattcacattacaatatggatgaatcttaaatgcattttgccaaatgcaagaaaccattttatatgccattctggaaaaggcagaactatagggatggaagtcagttgccaggaatcgatgggagagaggagttggccaaataacagtgtgagggaatttggggggtgataagactgttccatttggcattgtagtgggtacatgactctatacattatctaaatccttaaatctgaacatcacaagaaatgcattttcaaaaatgcttattttttaagaaaatcagtcaggatatgataaacacaaagtagaattcagactataacgaaggaatgtgtttttcacctaaccattgtgatgagagtgagaaaaaaagagctcacccataactttggaaaacagtgtaagacaaaagaaatgtacacaaacactgtactctagtacataaatttgttcctcacatgggtgtaggctagcaattttggaactcttttatatgtttactgagattgaacaaatcaatatattgcagatcgtgaaagccagttttctcactattgaagatgtacagataagcaagtgggagaaggctggaatgtgctggcttaggtttggtggtgttaatataaattaattgggatggttggatggatacacaaatatagatgtgtgtatacacgtgagtgtacttatatatacagtcatacatcacttcataactgtaatatgttctgagaactgtgtcatcaggcgaattcatcactgtgtgaacatcatgtgtactatatggtatagcctattgctcctaggctataatcctgtatagctcgttactgtgccaaatactataggcagtagtaacacaatggtatttgtatatctaaacagaaaacaaacagtaatcaaaaaatgaacagcaacaaatatggcattaaagattttttgtaaatggtattcctgtttagggcactttaccatgaatggagtttgcagaactggaagttgctctgggtgggtcagtgactgagtgagtgttgaatggatttgaaagcctacgacattactacacagtactgtagactttctaaacactgtacacttaggctacaggaaatttctttttaaaaaccttttcttcaattataaattaacatcagcatactgtaacttttttacttcataaactcgttattttagctttttaactttttggtaataacagcttaaaacacattatacagctgtacaaaaacattatatccttattttataagtgttttcctatttttgaaattttgccttttttacttttaaaaacttttttgttaaaaaaattgttaaaaattagaacacatgggactttatagcctaagagtttaaataataaaaataattagaacacaaatacacacgctggcttagggccacacaagggtcaggatcatcaatatcactgtctttcgcctcatgtattgtcccactggaaggtcttcaggggcgtgcatgaagctgtcatctcctatgataacaaagccttttttattttattttactttaagttctgggatacatgtgcagaacctgcaggtttgttacataggtatacatgtgccacagtggtttgctgcacctatcaaaccattatctaggttttaagccccacgtgcattaggtgtttttcctaatgctctcctccctccccttgccctccaccccacccccaacaggccccagtgtatgatgttcccctccttgtgtccaaatgttctcattgttcaactttcacttatgagtgagaacatgtggtgtttggttttctattcgtgtgttagtttgctgagaatgatggtttccagcttcatccatgtccctgcaaaggacatgaattcattcttttttatgactccatagtattccatagtgtatatgtgccacattttctttatccagtctatcattggtgggcatttgggttggttccaagtctttggtgttgtaaatagtgcaaagccttcttttggaacacctactgaaagacctgcctgaggctgttttacagttaactttttttttaataaatagaagtaggatactctaacactgaaaagcatagtatggtaagtgttagacaatgggattttttttggctgcattataattttacaagacaatggttgtatattgtatgctgtccatcgttgaccacacattgttatatgatacataactgtatctccctagctttgtctattgggaggaccccaaagcaatgagcacacctagccccgagatttgatttctaaatactgttctccagtaagaagaaccaaggctccttggagaagtggttgatttcagggccaggacaaggaaaatttaagatgagcttggcgttctgtggtacctgaaagtaaagaagtcctttagaagatgaggcatgttcacaggacataggagcacaccttattataactcccaatggccaaagctgcaaaaatttaagcaacaaattaaataacaatagtatttgattataacctaaagaataaaacaaatatccatgtgtccatacttacagaagaatttcaattaatgaatgtagaataaatgagggaacctttaaaacaccgtaataataattgttacaagataaagttagtgggtaaaggagaatcacaatatttgcatagttacaagatatctccccaaaaacacttacaaagttaaatagtaactttactgtagaggaacctgtgggacactgccttaaccaagtgatcatggttaattctaacaagtaataaaacttgtatcccctggacctaaagcactgagaaagatgcatcacctatatggaatctttccccaaaaaatgcataacgtctatccagtcatgagaaaacatcagaaaaacctaaactgaggatattctacaagataactgaccaatactgttcaaagtgtcaaggtcataaaggacagggagagactgaggaactgttacagactggaagacgctaaagagacatgacaacagaatgcactgtgggatcatggataggatcctagaatagaaaaaaatggtaaactagtgaaatccaaatgaagccgagtttaattcattgtattaaacttacgttaattttttagttttgaaattttttacgatagttattaatatataagatgttaatattaggagaagctgggcataggggaatcctgtccttcacaaatctaaaattctttcaaaataaaagtaaaatatccatttcttctaagagtccagttttgttttcacttatctcacaattactgataaaataccaaaagagaaaaaaaaggctgtttttctctgattaccgtcattatcaaacacttctggttttgtgatatatttaaaatatattgtggttatttgcaaactgttaatctggctaatatccagcttctataaggaacctaaacaattcaacaagcaaaaaactaaataaccttactaaaaaagtgggcaaaggacatgagcagactgttctcaaaagaagatatacaaatggccaacaaacatgaaaaaatactcggcgtcactaatcatcagagaaatgcaaatcaaaaccacaatgagataccatctgacaccagtcagaatggctgttattaaaaaggcaaaaaaattaacagatgccagtggggctgcagagaaaagggaacacttatacatcattggtgggaatgtaagttagttcagctactgtggaaagcagtttttaagtactttgttagagtacataaaaaagaactaccattcaaatcagcaatcctgttactggttatatacctaaaggaaaacaaatcattccaccaaaaagacacatgcactcataggtttattgcagccctattcacagtagcaaaatcatggaattaacctagatgcccttcaatggtgaactggatagagaaaatatggtacatacacaccgtggaatactatgcaaccatagaaaaaggttgaaatcatgtcctttgcagcggcatggatgcagctgaaggccattattctaagcgaattaatacaggaacagaaaaccaaatactacacattttcacttaaaagtggaagctaaacattgggtacacatggacataaagatgggaacaatagatgttggggactatttttatggcggttgagaaagtagcagctgtcacatgccaaagcactgtgcctggcatccccattctaatccatagtagctttgcctggggttttaatattagggactagcctggttatttgggggatattgtttactattgtccattggactgactctaacacttttgctgttttctgtacacctagttctatgctagaccctgtagaaatacgtaagtcaaaatcataattcctgccaataaactcccacttgtttgaaagaagacaaacatgaaagcattgtaaacggtgaaaagaccaatgactttagggattttatgatcatatcttcattatctgttcatcactaaatctgtggccttgtacatttaaactcactgagtctatttccttatctgtaatagaggatattaatatcagtcttataagatattgccatgatcattaacacctggcacacagaatacatttaacaaatggtgtctgtcattatcatggtggtggttataaaaagtgatacaccattggaatacaatgtagttttttacaataacttacctttttctttgaatattatgataggtgcttgactcagtctttgtgctttctcccttttagagatgatgaagagaaaaaaaagtctccctcagaaagtactgaggagaaagctaacggaacacatccaaagaccatcagtcgtattggaagtactactaacccatttttggacattcctcatgatccaaatgctgctgtgtacaaaagtggattcttggctcggaaaattcatgcagatatggatggaaagaagagtaagtatcatgcgttgtcattttctatttcatttattttatctttatgctcaaaatttaaagggaatttatctgaaagtcaaggatgaaaaaattatgtttatctatagacacattcttgaaattggataaagcctctaaccctaaattaaaaatccaatgtggcacctgctcttctctaagcagaattatagaactttagaaagggagaactcctttcaatttattcattctctatccattcatttatttagtcatggcttcaacaaataatactgactacctgctgtgccagccaccagaaatacagggttgagcaggagggacaaggtttctgtcttcatgaagtttacatttctggtggttgagggaaaggttgaatttgcaacgcatagaaaaattaatggtgtaaggtcccagagacaaaggatggagggagggaattcatatccagtacatatgtggaatgactcgcctttgagaaggtggacaggtgagatgtaggagagcatagtataattagttttgggaaattgaaggagcctaattggatggcttctgatttttctgtgaagtgtgaggcatgattatcttgatcaatgatggtgtttggagtttgagaagaatagagcatgcttatatagttagaataatctttgcagagtgaaatagcaatttgatatacttgaacagagtaagataaggtgacatgtttgctcagaattatctttggggtgaagagatggatagtaccactgtttctatctgtagctggatcctttttcttaatgtgttagcatattctattagcttacatggagagaaacattgcagtggggtggctttgacatggacttagcaatgctgaacaaatttcttaatgttcccaagttctttaagagtgcatccaccatatcttctgtgcaccttatatactagattactagactacttaattttatcccacaacattgtatcagaactcactcatatagttgtgacagcaagtgaatccatcttagcaaaagggcacacctgaagatggattgtcaccaggacgtactctccatttctatctctgcatgattttttgtgtcagcattattctttggaatgaggtcctttatacatggttattagcagtgctatagatcacgtgtttaattttgacaccaaagaggattgttcttcttccctaacttctcatttagtctgttctaggacaggattctgacttgtatcactgagaggatggaatattgtgattgacagcccccacttgcttgcaatgacagtaagaatgagatactggtctcagagaatgggagttcttggcacacaaagcaatagatacccatttgtttctttccagtgtgcagacacacccttcttcatacattgaataatacttttgccaaacattgcagttttccttttacaaccacaaatataccatctctctgtaacatgcctgcccaactgcagcttctgtctccaaggctaagatttgttgatagtgttcattcccctcagtcaggtatggatggcactgaaatctataggctaagtgaaaaatacgaaaataccgttgtcccttaatatctgtaggggattgattccagggcctctgacaggtaccaaaatccaaggacactcaagtccctgatataaaatggcatagtatctgcatataactgatgcatatcctcccatatactttaaactgtctctggattacttataatatctaatactgtgtaaatagttgttatgttgtattctttggggaataatgacaaggaaaaaagtctgtacatattcaatgcagacagaattttagagggaatattttccatccaccgttggttgaatacacagttgcagaacccacagatatggagggttgactgtatctgacatacctcacataaagtactagagaaaaaaaaaagaataatttcaattcaagaaaagtcaaaaaggggaagtataacagctatcacttattcggagtatttactacttcctgctagacaggtatatagcacagttaacccatgtgagcatcttttcattgattcatttcctagcaatggattgacttaattggttagtttattccaaagtcccagattctactgataaaattttccttgtccactgttttcctggacccagtggcccaggaaacctcctctattggaggattctccgggtagaagctcttctccctcagcggcctaatacatatgaatatagatacagaacctgaggattgcttagcagttgagacatcacagacaccttgtaccaggctagaagtttttctgccattgtatctcctttaaagccttagttaactgtcttgagaatttctgattggtcaaggcagttttaagtgtcatggggcttttgtctttgtagcaagttaggaagttcgtcctgctttccaaaggaacctgcctctgcttgtttctatctctgttcctgcctcagaaccaaagggaaaatatatggatgggttaagacgtgcccatctccaggcttctttcctgtcagttgctttatcactggaggacttttaacctctgtttttccatggggctatcaggaggagcgtggaagtttcagctgcctttaattcctcaggctcttcctggatatccccatttcaatttcccaaggtttccaaatcacattaatgttagcagataattcagccttacaatccagaatgtgcatggtttctaataatttacaaaaactaaaattcaccaatttagagtatatagtttgagttttgaaaaatgtatagttatataatcatcaacacaattaaaataaataacatttccattacccagaaaagtttaactgtacttttggcagtaattgcttctcgtattactcccatcctatgacggttatgacagatgattatctgtctttgggccctatacttttgccttttctaaaattgcaataaatggaatcatgggactgctttgtgtttggcttcattcacttagtgttattctttgcagattcatgtatattgttaggtgttgtgtgaattaatagtttctctcttcttattgcttaataagtattccattatttggatatcccacagtttattgattcaccagctgagcattctggttgtttccagttttgaactgttataaataaagcccctatggacattcacatataagtttttgcacgtacatatgttttcatttcttttcagaagttacctaggagtaaaagagtaagattgcttcaccatatgctaaatatatctttaactttttaagaaatttctaaagtttctatatcattttgcatcccttatacctatatatattatgtcttcctgatgatttgacccctttgtcatgaaatgacgtccgacacccctggttatattccttattttggagtctactttgtctaatattaatacagccactttagtttccttcatagtttttgcatgctatacaaattttgtttctaactttttattgttaatttatggttgtgtctttaaaattgctttctattatatggaatattggtgggtctcgctttttattgtaaatcacagtatctgtcttttaattagagtgcctataccatttacatttatagtagttattagtatagttgactttaaatctgccgtcttactgttggtttcttatttattccgtctggtcttttcctttcttgtgtaggattattttttgtgtgtggttctgttttttgtcactattggcctgtttgctgtacttctttaattattttagtgtttgctgcaaggtttacagtgtacatctttaatttgtcacagttcaccttcaaattgtactgcttcatttatggtttgagacccttatagcaagttaattccccttatctcttcctagcctttgtgatgttgtcctatattttaattctatgttctaaaacttaaagtagttcattgttaatatttttgctttaagcagaaaccttttttttacttttacccccacataactgctgtcaggaatttttctcatgttttatcagtgtgaaaatatctttattttcaccttaattttaggaatgtatattcactgggtatagaatcctttggcaggttgtttttcctttcaatacttaaagatgatgtttcatttttccctgccctgcaggatttcagacaaaaaaagtctcctatcattcttatctttgttcctctgcacccaagatggctttttctgctactatgaatgctttcaagatttttctatctctggttttcatcaattttattatgtgatgccttagtgtgattttctttatgttttccttatttggtgtttattggggttcttggattcataggttcatgtttttttcagccattatttcttaaagcctccactcctgttatgggacttgtttgctatatgatactcagtgctatcccaagggtttcctgaagctctttccaatatttttaactctttgtcatttcagtactttatttgatagtttttattcttcatttacttcatttttcatttcataatcagcatgtttatctttgaagttcaacttgggtctattttatatcttccgtttctctccttatcaggttgatgtttttcttcatgtccttgaatatatttattctgtttataattgcttttttaaggttcttctctttgataaccttcctttctgtcgtttctggaactgttgcattattttttttctgctggctttagtcatagttggtttttttttcctttttctttgcattccttgtaatttttgagtgccagacattgtgaattttccatttttcaggtgctacttttagttgtattcatctaaaaaaaacactggattttctcctggtgtgcgggtaagtaacttgcagattaactgaattctttagacgcttgcctttaccctttgttctggtggatccagagcagtctttattctgggacttatttaaatatttccattaataaggcattcttgttcttcttcagcctctttccaatatggcatgtattacacagtctatccactctagctgatgaaaacataaattcttcttagccctgtgtgagcccttgaaattgtccatcccactactttatttttcccatgccttgaattatttcctttcactagtgctaagatcgatgctacagccaagagcagagtatcctctgcaggtcttcagaaccatctgtttttgtaactctcccctctgttttacgcagctctacaaattctagccctctcagcatcactaaactcctttcttatctccgcatcactaaactcctttcttacctcctcaactcagcatgactcacaggctctgtttaggtaccctcttccactgttggaaccgagactctttctctaagcagtaagccagtcttaactcatttgtttctttctcttcagaattataatccaatgttttctgttttgaaatgtctaaaaagttttgttttatatacttacatagactttttaagttattatagtagggcagtttctatagcagttactgtttcttgggcataagcagaactaagctgattcatgatcccttttgttaagaaacgtctttccagttgcttcccgctttaagacctaatatttactgaactatgaaattaataaggaattctaagcattcaagtaaaagcaaacagtttagttatatatttggagatgtagaaaagctttcgtttccttcccgtctaatcctgtctcccccaccaacctcatttgttggattttcaatcatgtctggttgaacaggtttatctaactatttggctgctgctccttcttggaaatctaccagaatgccttaattgtttctgaatgtttttgccttcttcttttgagagatggtcactataaacaaattagagaaatgttttatagtaaggacttacacaacctgctataaaacacatcactttttatttacactacacagaaaaaaatgaaaacaacagtggagctttcctggaataggagctccaaataattctgagaatcctgaatgctgttttttggacacaaaaagtagatacttattttctaaatacttactttgattaagcatggtcactataggtagacctatattacatttgtatgtaaatttaaacctggccaggtgctctgatgacaaatattacaaaaagtgttttataagtgaaaatttgaatcaaagctgcatggaaaggttattttgttttaaatgctgatacacttgtctcaaatggaccatttatttcactcaagatttggtgtcttttttttttaattaactttaaacattcagtttgtcagactgcatccatatttttaaaccttggaggttttcttcattttttgccttttaaagttatgctcagttcagaaattctgcctccaggagacaaattgttgtacctatcttagaagtatgtatttttacaaagacctattaaatctgacattaagggaaagctttgaaaagtcaaatttggaaaacaaaacgcatctcctgggttttgtcagatacaataaaaaacaaaattcagtataagctcttagttttctcaatatgatgtaacatacttgtggaaatcaagaaagaaactggaaacaacatacccaaaatataaatgatctacacaataacaatagtgataattaaatgattgctaaatattagagctttatcctaagcatttcatgcattaatacatttaatcttggtcctataaagcagatattattattgtcctcattttatacatgaagacactgatcctaagcatcttaaccaaggatgtagtatagaatagcagtgtatctggtggaacaaaaatctgattataccaaactaatagtagcatattgttaaaagcaattccgatgagaaaatatgcttatgaaatgtttaaattctgcattttttgtgtagttgggacagtctgtcactgtgtagcatgtatttagataactggaggtctcaagctagggacagtgaagcctgaacatttcttttacttggccaacacagtgctgtttaaacactgaattgcctggatgtaggcattttctggttgaccatagttttcacagctccctgtagccttataccaaacttcctcatacattaagggggagaagtacagtagggccatgttgacattttccaagataataagacatacagataggatgatgggttggaaaagagaacccagaagcagcagtctccagtgtttataaaaatttgatggatgatatagaaagtaagtcagataattagaagcaaaaattcttccgtaatttatgttgagaagtgtgtgtgtgtgtgtgtgtgtgtgtgtgtgtattccccacctcagttctaacacaaaaaccagtttcacgtagattaaagataaaaatttgagaaacaaggttctaagatttttagaagaacatgtgggacagtaacttcatgacttttgggtagaaagtgaattcttaagatttataaaagcagctgggtacagtggctcacacctgtaatcccaatactttgggaatccaagacaggaggatcacttgagcccaggaattcaagaccagcctgggcaacatagcaagacatcatctctacatataaacaggcatacgtatatacatacatatttacaaaaacagtaaaaaaaaattgatatgtataattacactaaaagtaaagactttatattaaaattgtacttaaaaatgaaagataattcacagattaagatacttgtagcatattaccaataaaggattaggatccatggtaatatttataaagaaattttttttttcattattttttcttttattcttttttttttaatactttaagttttagggtacatgtgcacaatgtgcaggttagttacatatgtatacatgtgccatgctggtgtgctgcacccattaactcgtcatttagcattaggtatatctcctaatgctatccctcccccctccccccaccccacaacagtccccagagtgtgatgttccccttcctgtgtccatgtgttctcattgttcaattcccgagaaattttaaattacttataaaaaatacaactcagtagaaaaatgggcaaaaacttgaagaggccatgctcagaaaatgaaactgagatgatcaatacatatatgaagacatattcaaccttattgatattcaaggatattcattaaacatatagtgaaatgtcatttcacatgttaccttgacaaaaattaaaagaataccaagtgttggtaaggatttggagcaatgggccctcttctaccctgcaaaagtattagtggtatcatttgtacttcagaaagcagttggcaataataaagttggaaatgtttattcttatatctcagttaattagtcataagggtgtatacacctataaaaactcttagtgttacagaagtcatgtttatagcaacattataatagctcaaaatttaaaaacttaaatgtccattaataagagattgaatggattttgtatatccatataattgaaaaggaaggagctagagttccacgtatcaacatggaggaatctcaccagtggtaatgttgaatgaaaaaaagcggcttgcagaagaatctgcacgtaagataacatttgaaagcatgcaaaacaatactatttttagtaagaatacattcatatattgaaattattaaacatagaatggttgttacttctggaaaggagaataacaggcagtcactgacaagtacccagtggtttcactatattgataatatatattttttacatttggcggtagtacatgtatacctactttattactcttgataaccttttgaagtcttatatgttttacaattttttttttttttttctgagatggagtctcgctcagtaacccaggctggagtacagtggtacatgcaattgtagctcactgcagcctcagacttctgggctcaggtagtcttcccacctcagccacccagatagctgggactacaggcatataccaccatgcccagctaattttttttttttcctttttcttttttttttttttttttttttggggagacgggggctgactatattgcccagactggtcttgaactcttggcctcaagcagtcctcctgccttggcttcccagagcgctgggattacaggcataagccactgctcctggcctataaataaaatttttaaaactcaatagaacatctgattgcatggaaaatttagaaacatataaggatgtttttcttaaaatctgcacaggaaaattacaattagaaaactcagtaaacaaaaatccgtagcgacagaaaacggtgaccagacacagtggctcacgcctgtaatcccagcattttggaaggccaaggcaggaggaccgtttgaatctaggagttcaagaccagcctggaccatatggttatagctgtctctacaaaaagattttttgaatgaaaattgaaaagaaaaaatgactttgtgatcgccatcattatagcataattaataatttaaaatcttaccatagtaatagaattttggttactcacatttagatatgtgaaagatttaattgtggtacacattaaaatataaatattgtgcaacttgaacctgtaagagtacagatgatagaaggtgggaggtaaaactggatagaactaagagggagcagggagagagatccgttaagctcctcttacagagaggaagtcagaagatgctgcctgtactggagaaagaagaaataatgtcagtcattatttgtcaaattaatacataagaaagtggcaactatgtgaggtgaaaagtatgtcagttagcttccttgtggtaattatttcaccattcatatgtaaaaacatcaaattgtacacttatgtacaatttttattggtcaataacaccttactaaagctggggaaaaaatttttcactaaaataataataatgttatgctccataaaactacagaggtaatcaatacagatacaaataaaagctatgtaagtatattgggaagatggaatggcatagttaagtttgttaaattctcatctagcacagcacaaaactgagagtgtgtttacagcctattatgacacagtggtagaagcacattgtttagggatataatgtcacttaacgactcggagaagtaatttgtttcaaaaggtttttttgtaaaatgggaacagaggaggtgggaagaaatgaatcaaaggaggctaattgtgtggacatatcactttaataattttaaaatattttaatcacattcttttatagattctttagtcattgtacagtcctgagattagttctgaatttgaaatattaaaatattcatcgctttttaaggaggtgagaactatgtgtggttcagcttttcaatctcattgtaaatactgtggatacaaggagtggtgtggagcaccttgacaaggttggagaggttcactcactttagagggatttacacacctgcctgtcatcaaaagtttagaaaatttagtcccacatgtcaaatttaagaaagtagaatttattctgagtcatccatactgaaaatagtttataatggtaatgcaggcagaattctttgctatcgtgtaacattgggaacagcgacactataattaagagataataaaagtggaattttttttcccaaaagacagttgtgtcctcctgttagagcaagactctttaagtacaggcaaagccaagcaattattttaaaactaggctaaggttttcccttcccttggcacttggctgttctctggcagcagggtgtgtaacggagcagtttaagatgttaatacaaggccaaacaacagcactgtgagggcagccatgtgaacgcgcaggagcaccttgtcacgtgactctctagttttaatggaatattggctgttttagataggaaataccccattcacaattcaaaatttagactaaaagattaagttctaggtttttacattccgtaatgatggctcatgtctttaaaatccatgctttctggcaataaagtcggttgaaagaggtcctccgccatcattctcatcaggagcaatagtcttttttctgagacggtgtctcactctgttgcccaggctggagtgcagtggcacgatgtcagctcactgcaacctctgtctccctggttcaagcaattctcctactgtggcctcctgagtaacagggactacaggtgtgtgccaccatgccgggctaatttttgtgtttttagtagagaagcggttttgctgtgttggccaggctggtctcaaattcctgacctcaggtaatctgcccttctcagcctcccgaagtgctgggattgcaggcgtgagccaccgtgcctggctggaagcaatactcttgactaggaacaatggaatataaactgccaatcttatagcaccaaaaaatctgtgttcagaatctctgaagtatttttctgaaagaggaatgttcagttttcactgtgcatgtgatttttagaggttattctattttcactgctgactcgttctgtttatgatttcggtttaattaacatttaggagaaagaagaaaataattcttccatccctgttgtggtaatttaatgcagtgtgtcaaattctttaataatctgatgaaaatttgaaattaaaaataccgtactagtttcctaaaggaattaatcatggggataagaatgtatatgcaaaagatgttatcactaatgttaatggaaatatcaaactctgcaaaatgttttctctttttttcttttgttgagacaggtccttgctcactcacccaggccatagtgcagtggtgtgatctgggctcactgcaacctctgcctcccaggctcaagcagtcccccctacctcagcctattgaatagctgggaccacaggaatgtgctgtcacaccccactaattttttattttttatagagatagggttgcaccatgttgcccaggctggcctcaaactactgggctcaagtgatccaccaggcttggcctcccaaagtgctgggattacaggtgtaagccaccatgcctggccctccaaactccataaaatatcttaaagaggtttattctgagccaatgtgagtgaccacagcctggggaaaaaaaaaaaaaaaaaacacaaacccaagaacccttcagtaagtagtcccgagacagtcaggttacagtttggttttatacattttatggagatgagttacaggcaaagacataaatcagtacatgaaaggtatccattggttcagccccaaaaggtgagcatcttgaaatgggggcttacaagtcataggtgggttttagggatggttgagttattggttgagagagttaagctgttgtctgaggacttgaagagtagacaggaatgcttgagttaaggaggctctgggagccacggcccttatcacgtagaagcagcctcatgggtggcagccctcagagaaacagactataaatgtctcttttcagacttttgaggtgttgggctcttagctaatctctcctacatctgggaaaggcctagaaagggaaggcctggctgcatcaatggcgattctccaaagatgttaatttcccccacaaaggacggctttggagggtcatttcaaaatagttcaaagaaatttattttggggtaaaatattgtgattgctttcagggtctgctgtcatgtgatgctataccagagtcaggttggggagtaagccacgttataccaggttaataaaaatccatttagtgaaattttatggttagggtgtgacttcacctttgcctcacatggccacacggccttaggtcttttttttttttttgagatgaggtttcactcttgttgcccaggctggagtgcagtggcgtgatctcagctcactacaacctctgcctcccgggttcaaaccgttctcctgcctcagcctcccaagtagctgggattacaggcacgcaccaccacacccggctaattttgtatttttagtagaggtgggtcagaccttgttggtcaggctggtctcaaactccttatctcagatgatgcacttgcctcggcctcccaaaatgctgggattacaggcatgagccagcataccccagtggccttaggtcttgtttataatctggtatcttattgccacacagagtctgttttgatcagtcttttgatctgcattttaaccgtaatgctggtcagtcgggcctgaacttgaaaaggaagtggatataaggaggtgcatctgaacttccatcccatcgtggcaggcattcagttttttaggtttcttttggtcaagagggggtccatgcagttggttggagggcttaggattttttatttgtttacactagatagacctaagaatttgagctttgaagcaagatagatcattgatttattttttaaaaaacactttgagctcaagcagtatgccagtaatactcttggtgaggaggagtagagatagaggatatgccttgttactcggctgagaactgaattacaaaaggaagttccgtgatatctttggacacaaaggtcatggataagcgtattccaccacagcctgagcaacatattaagaccccatctctacaaaataaaagaataaaaagttagccaaacatggtagcatacgcccctagacccagctagtcagggggctaaggtgggaggattgcttgagcccaggatgttaagtctgcagtgagccatgattacaccactgcactccgtcttacaaaaatagaaaagaaaagaatatcccattagaaaaaaaaaatgcaaaaaccttaaggtgagagcaatcaaatacggctaatacctgttatggtgtgtagtacactgcctggtacatagaaggaatccagttgttattttagttacaaaataacatcattttagaaacagtttaatggccaataaaatgtttaataagtaaaatatgatagatacagcaatagaatttcatcatttgccatcatttttaaaaatgatattgttgacaaaaaaaagccaaagtctgtaaaatatttgaagaggcttattctgagccagatacaagtgaccatggcccatgacgtagcctcaggatgacctgagaacatgtgcccaaggtggttgggttataacctgtctgtatacatttttgggagaccaaagttataggcaaagacataaatcaacacatataaggcatgcattgattgatttagcccagaagggcaggacacctggaagcaggggcttccaggtcatagacggattgaaagatttcctgattgtcaattgcttgaaagacttaagctttatctgaagagttatagtcagcataaataaatatttgagttaagttgagggggtggtggggtggaagccaaggttcttgttatatagatgaagtctctaaataatagacttcagagggaatagatgtcaaatgtctcttactggaccttaaaagatactagactctccagaaaagatttagcaagggagggagattctctatagaatgcagatttcccccactagagacggctttgcagatcatttcaaaatatgtcaaagaaaatgcattttggggtacaatactttgatttcccttaggacctgctatccatcatgtgatgctatattagagtcaggttgaaattggtatcttagtgctactaagagtctgttttgtcagtgtcgggatctccattttagtgttagtgctggtcagttgtgcctaaactccaaagggaggagggcataatgaggcatgtccaacaccccctttctgtcatgtcctaaactggtttttcaagttcctttggaatccccttcaccaagagtagggttcattcaggcagttgggagcttagaattttattatgggcttacaatgtatgatatataaatataagagttttgtttgtttgtttttgagatggagtttcgctcttgtcacccaggctggagtgcaatggtgcaatctcggctcactgctacctgcgcctcccaagttcaagcgattcaccttcctcagcctcccgagtagctgggattataggcacccaccatcacgaccagctaattttggaatttttagtagagatggggtttcaccatgttggtcaggttggtctcgaaccccttacctcaggtgattcacccacctcagcctcccaaaatggtgggattacaggtatgagcgaccatgcccggccagtagaaaagtttaaaattaacaaatataatatctcagtttgttttgcatgtgtgtacatagtaaaatgattagaaggttctatactgtaggggtcatccaggaaaaaaacttccccatcaccctctgaaggttcactgaaaaatcaactcaccaaagccaggtgaatgagagaaaaggtgtacaaatttattaacatgcacacaggggaaaatcatagattgattacacgaccctcaatggagtagagaaacttttaccttataattgaagttacagaaagaatgggggcttggatcaaaacaggttatgaaaagagaggaagatggccgggcgcggtggctcacgcctgtaatcccagcactttgggaggccgaggcgggcggatcacgaggtcacgagatcgagaccatcccggctaaaacggtgaaaccccgtctctactaaaaatacaaaaaatgagccgggcgtggtggcgggcgcctgtagtcccagctacttgggaggctgaggcaggagaatggcgtgaacccgggaggcggagcttgcagtgagccgagatcccgccactgcactccagcctgggcgacagagcgagactccgtctcaaaaaaaaaaaaagaaaagaaaagagaggaagatgaggcctggctagcaaaggtgttcctgttaagtaaatgaaatctcacaagtaggtggtaaaacctaggcatgatgagagcgagaatagatggtgaatgtttctttcagacccttaaagatgtcagacactgagttaatctttcctagatccagacgagggaaggcctcggagaatgcctggccaccatcaatacagattctctccacagatgcaaatctcccccacaaaagatagctttgcagagctacttctgtttgcagggcctctgaaaggccatctcaaaaatatgtcaaagaaatgtattgtagggtcgggtattttggttttcctcagtgaagagcacttgaacgcactggacatctgataaatggaagaaacgtggtctgagttgggaaaagctaagaggccatcgtggagcagcatcacctcaggtgcagtctgtagcagaccgttttctggctcctgcgcgtgagtggtaagccagagccctcgccctgtaatgagggccaggaacacctatcagtaggcaaagcttgaagtcacttttggagctcctaggttggggaaaagcaagtgaggctgttatattccttggagaacagattctgtctggaggctgctcatcagccactttgagttatttttattgaccttcagctgtttttgcccggaggcattttaaagatgcccgtgggccttgggctgttttacaattacaatagcttatttgaattgctagttgtagaaatgcgtgcacagcagggtcttcgctctgtccttccctggcttctggggtgcttcagaggttgaggaaacctgatttgctgtcacttgacaagcccacttgtctgattcagcagttacctgcccttctcagatagactgcgatgatttaaccttacatttattttaacaccctgctcttaaaaggtatgtaaaaaggtctagaaactgctctagatattatgaaaaaaatcatagtatgcttgattttcttgatcaatgttcacacctttcacataaacgaacttatcaaatgttatatataaagtttcagtgctgcaaaagaaaatatcactcaaatataaaattttctttttaattctcagcaagacacgttacttctatatagaagggtgcgcccttacagatggaacaatggtgagcgcatacttggacaagggaggggaaggggttcttatccctgatgcccgtggcccttgctgctgtgtcattcccttattggctagggttagaccgcacaggctaaactaattccgattgactaatttaaagagagtcactgggtgagtgctttggcaggagtcagggcagagcaggttgggggtaattggaatgagttagggtggagcaggtgattggaatgtagggtgcagcaggtgatcagaatgagtcagggtggagtaggtaattggaatgagtcagggtggagtaggtaatcgaaaaaggttgctttacgaggaagttaagtttaaaagtagacggcaaagaattgaacatattgacatattctttgaaaagaaatttagaattcatatctaacattgaatttcaggaaatttttgttatgcctaactttttgaagtgattattaaaaacagcaagttctccagcatattccttcagtcagatatactttatagaattatgaggcctgtgcagtggttcacacctgtaatttcaacacttagggaggctgaggcaggaggatcgcttaagcccagcagttcgagaccagccggggcaacattgcaagaccccgtgtctatgaaaacaaaacaaaaaaaaaattagccaggcatgatggtgcacacctgtagtcccagcttctcaggaagctgaggtgggaggattgcttgagcctggcaattggaggctgcagtgagctgtaatcaccctgtctcaaaagaaaaaaatatgtatatgaaatgtcatttgtttgatagaagtttgaagtcacttgtcacaaatgttcattctttaattaacccatgaaaacccacagtaatgtattaagccttatttgttccttttaagcctgggtgtttactgataccttattcccatattcaatgtcttattggaataatcgaccacagttttattctacctcctcttttctctttaagcatcctgcgttttacctaaaagattaagcactaaaaaaaaaaaaattcccggtaatatttgttgaatgatgccatctacatgctagtttaggacatctgatttttttgggggggggatgggggagaaggggttaatctgctctgtggttgcagcaacaaaccaacgtacttgccttcaaggttttattctaatgctggagaagcttaataaaaactttgtgataagttacacagctgttaactgacccaaagaaaagtaaagtcaaggttaggaaatactgaaggaagcatacacgtcctatgttgcagagagtgattagaggaaaccccaggatgaggcatgtcaactaagaagagatgacaaaccagaccgcaatgcagtaagacaagacatttattgggcccttaggaattataattcaggagacacagatttggctgtaagccaaattgtgttccaaaccaagtgagggtttttcaaaggaaactaaaggattacacaagttgttttgaaggaattatcatgggtggaggcggccggcttagcacaagtccatagttcatttattgttgctgtttaggagttgcagcgctggtgaaattcagctgtttttcaggatatcatggttgtggtggttaggtgcacttcaaagattcaaggcaaggtactgggttgttttgcaaggttgccagtggtgcaggcagccctgagaatggattctgctttagagccctgaactgtagtgatgccgttttctatgtttcacagataacatttgagcagagacctaactgaagtgaaggggccaagtcatggtatctgggagaggaacattctagccatagagaatgtgaggtatcattcattaagattcaaaaaataattctgtgactctagcgttgcaggaaaaaaaacggggttcttgtcacacgaccaggaaagattaggctcgcagacacgtagaagggtgacaagtggaatttattaggcagaaatgaaaaaggaaatacgcatcagcaaagtgagataagagtcctgctaacaggctctccatctcagggattaaatcccaccttaccacacagaaacgagagagaccaggctcctcccccctgcaaacagtgcaaacttcccaaggccccaccccctcctcccaatgtgcagatgggcgttattcagaaagaatcatttggggaaaagggtgggcttcatccggaccggcagtctggtttttcatccctcatgctgttttaggcttgaaggcggcatttcgtcaggtgttgggggcaggaggggtccttggctgcctcctgtctctatcactggtgtttatatttttcctgaaaaaaatgatgtagtgagagtcattttgggatttgttgcttcccacacacgtttccggtaacccttagctaatgatgcatgctcttgtgttctgacctgttttccaacctcagcccaagccatgtaaattcttcctgcacgtctagtaatggctgccagtgaaaccgtctcctggccaagtggggaaagatacttgtttttaagttagatctgagcgactctgtggctcatcttttgggtagaaagttctccaacagcttttgtctcttctattgtctacttttattgtttgcattcatgtttgatatctccaatgtcaatacaggacttgggacaaaatgaaaacaataaatatattaatcggagtaaatgtgtcacacttagctctcttcccagttaagggtggtatgtgctaagtgtttctgttaaaaatgcatcagtaggccgtgtgcggtggctcatgcctgtaatcccagcactttgggaggccgaggcaggcggatcacgaggtcaggagatcaagaccatcctggccaacatagtgaaacccatctctactaaaatacaacaacattatccaggcgggtggcgggcgcctgtagtcccagctattggggaagctgaggcaggggaatggcttgaacccaggaggtggaggttgcagtgagccgagatcacgccgctgctctccagtctggcaacagagcaagactccgtctcaaaagaaaaaaaaaaatgcatcagtaacgttaaagcggtgttctcaaacattgacttacaaaaaaaattccgaatacatgaatgaaatgtcaacctgaagtaactgaaagcatcagaatccaattttagagtttattcaagcaagaatctgggaaacatggactccagagaaatgaggccagtgctctgaagtaaaaacttaaggtcttgcttatatatgggcagaaacaaagaaatttagtaggattgtaacttttttttatgtaaggctgctttgtgggttataataatttagttatttttcttttccgtacagcttgtttttcttctttacagcttgttatcatttacttcacaatttaaaagagttcatttaacattccaccttagacaatgtgatagtcatcatcaagtctttgtgtgagaaaggtaagagggaaattaatctgtaatgaagatcaacagttaagcaagaaggggtcttccctgctgccttttagtcatttgcaacattttacaaaacagtgtagataaggaaaaaggctaatctataatcagacaaacaatcagagaagcaaagcttacagcttcctaggttacagctgcctgttaatgtgatccatccaggtcccttaatcacattcccttaaggctctaataaagttccagcaacttagatttaaattgcttattttcacagcttattttcacagaagtgagaaaaaaagtctttctttgtgttttagcatgaaaatttgatgcattttctttagcagacagtatctttaattaaaaaaaaaatccaaaggattgcatatattaactcatctaagtctcagaaaaactgttttatacaggaagaaagtaaagcataggactggctaagtgacttgtccaaggtcactcaggtgaagccagtatctcaaaccaggttctctggttctaaaatgtgtcctcttaaaaaataaaaaattatgtgttttaactgttgttcttaggctgtcttgctaaaggatgatgatcatttgcaatgttttgagacttccaaaattgggatccacattttgattccatgtcttcctgctaacatactgtacaaaaggtgaaggttaaaagaaaaacctttttttttttttttttccaaaatcctacattaaattacaccctcatttaaagtgttctctaacctctaaatcctattcataagcagaattaatgacctcctccttgttttacctcctggaatccccactgtgattgtcttaggttagtgccatgctaccatttagtttatacagtttatcatgttaaattaactttcattgtttatgttactgcctgtatatgtaaattatttaggggtagggtatgtgtcctaataatcttatgtacccagattaactcaacaacattataaagtaattatggcacatcgtagtagattcattgtatagatttttaaccagagatgtttagattacttgtccaaaagcggagaaatagtgggcatcatggtgtgaataaaatctaagtgcctagctcccagtttatgatactttctggcatttcagaacattttagggtaaaagtcttgagacctcttataggaatagagccacatccagaatgaacagcaccccactagggaacactttgaatagaatattcttccaattctctctttgttttcatttcttattctctatcaaaatatgcattggttgctattatataagaaaaggaaataattttctgggaaaagcaataggtataggttctgttaaaagaaaagcttcagcccaattaaatttaaaggagtttaattgagcaatgaatgattctgaaatcaggcagcccccagaatcacagcagattcagagagattccaaggatgcctcgtggtcagaacaaatttatagacaaacaaagggaagtgacatacagaaatcagcagtgaggtacagaaacaactgggttggttacagctcagcacgtaccttatttgaatacagttcgaacactcagcagtgtatgagtggttgaagtacaaccactgggattggccaagactcaggtattgttacaggtgcatactcctaagttaggttttcaatcttgtctacctattaagttaggttgcagttcatccacaaggactcaaataaagaagtatagagtcctaaggccatatttagtttgctttaacagttcctacaaggctgccctacttttttcctttataaaatagagttgacaaagcatccttttataaaagagaaagactataaggattaagtgattttttttgtaatgtgtaaattgccttaagtgtttcaaagataagtgattaggaatatatagtagtaatagtactgttttagtgctaccacgctgctataaaccagggataattaatactgtcacttgctgaatactggaatactgtgtgactcatagcccagtggtaaattttcctttgctcagcttggacttgattgcttcaagcagtaatctaaaagtgcctgagctgctctattaattaagatgtaatagaatatcttgtgatgcctgaggatattttgtaaaagaaagttagaggttaatatacaggattacccttaacttcacttaatcatctgtgagtctgtcatctatgaacttatttaaattctttgcacatcaattgcagaaagcagactcctccctgcgtgagttgtatcttcaactgtgtcattgattagaacttcagaactcccttcttatcaaggtagcctgtttcttcatgctttaggctacatactttaaggattttgttttaaagatactttaagttgtttagttctatcactgagaaaatagaacagtcttaaaaatgccttgtgctttttacagctagtatagatgatgtctcacttatattagtacagaacttctgctaagtatatctttgttttcaagttcattaaagtgctgggtttattttggaatgccatcattgggattgctttatattgtgaatatctttctccgttaacctcaggaaattcaagatattttgcattagaactacctcatccccacatacctgtttcttggcctggcaggatttgcattgtcggccttcacgccaagactcttggtgaggccctgaaaaataaattacttctcattaatgtgtatatggctaattctctctctctactctgaggggaataaaatggtttttttgtcattttacatggaacaatgggagaatattttcaagacaacagacaggaagtaaagattaatatgttaaatgaaaacaataggcaatgctcatactatgtctttctatccatattatgactttctatccatattatgactttctgatagtaaacatgaggaaaaggaaaaaaaagatgatcagggcacccagagagatgagtggtcaaaaaacaggacaagattttgatgtaggaacaaatgctctgccatttgaatgaaatagaaaattggaacagtaaaatcttaaacacaatccatttccagttcagttgagaagaaaagttggagagtatagcatgcaaatataaacttctgcatgaagcttataccttttggtggattaaaaaaaaacttttctggcataaatccattattactcgttaatgaatattttattgtttagaaatattttatatcttcctctttatgaaagaggggtgatactgtcttttcattccccgttaagcatttcacttttacaaaaatcagtggtaataactaaagccaaaatattattcactgtactttatatttccaaatatgtttcttcaaattagtaataaagagaaaataataactggtttgtaatatttaagattcagtgatggctccaatatcacccatctttggaggaactgccaatttttctattgcagaaatgtggtcttcatgtgtatgtgagtttgactcagaataacgatcacagcagcttgttggtttcattcacttcttaatttcacccatactggtcaggaagcagcccccaagccagagctgatactcagagactgtgtactggtacagaccatttactgtggatgtcccttcaatctgactggaacagtgcttttcccaacagctcaaggtagctcctgaatcaactcttaaataattttttttttgagacaggatctcactttgtcacccaggatagaatccagtggcacgatcatggctcactgcagcctcaacctcctggactgaaacagtcctcctacttcagcctcccaagtagctgggaatataggcatgcatcagcatgcctggtgatatggtttggctgtgtccccacccaaatctcatcctgaattgtagttcccacctggtgggaggtaatttaattgttgggggccattactctcatgctgttctcatgataatgagtgagttctcctgagatctgatggctttataaggggcttttcccctttttgctcggcacttctccttgctgctgctatgtgaagaaggacataatcatttccccttctgccgtgattgtacatttcctgaggcatccccagccatgctgaactgtgagtcagttaaacctcttccctttataaattacccagtcataggtacatctttattagcaatgtgagaatgtactaatacacctgacttcctttttttttttgttttgttttttttttttgtagcagtggagtcttgttatatgctgggattacaggcgtgagccaccgtgcccagcctcagctcttaagtaattttaatatcactcctagatcccagatttatccaagacattgcctcccgaatctagtttagctggcctttctctgtatggaaaccagagtgaaaacgcccagtgctatggagaaacaagtgctgccggttcataggaggtgagaggaaggtggtcataggttccacatctgtgagatggaggttataaccgtggatccctcatagacttacgggcttttgtttatacaggtcaaatcttggaacagtgcctaaaacagtatgtgttcagcaatcatttgctgtgctattactacttctgtaattattagtaatattagataactattctgcagaaatgtggagctgggagcacctgagggggcaggcacagagactgtgcctctgttctgagatctgtagtcatgagcagggatgcctttgaaggtcctatagttgagtgagattagagaaagtacctggttatatttccctcttatctcatcatctctcttcctgccttcagtgcccacctcacaggagtagcagaccgaccactgcaaagaattgtcacctggatattttctatttcttaatgtatctttagaaaatatttacttaattgtcctgtacagtagctttgaaatccttagatgggtagcttccttgggggcatactctacctttcagaattgtaaatatagttaataatgggggcataaaatataaaacagagacaataatacctacctgaaaagattgtttggaacacatagaacgtataggtataacgttagcccaacactcagagtgctgcagtgtaggtgcttagttaatgttaatgcctttccctttccttccattttatcttaatgtatcgtatgcctctattcatgttctggcctttttctcttatctcacctactgtaataatttccttactggttccccttgttccagtttctctccttgttctcactctgcaatatctcctgcatcctgctccaaatgaattcttcctagataacaaagtttgtgcataaattcttcccttcttataaaaagaaggaaagaaaaatgcaatagagaatctattttttgcaatgtgatggcctacagattctgaaactctcccataataaaacatctaaaactgatagatgaaatatttttagataacttttatctgaatggataagcctgtaacaatgaaagggaaatcctgttaggccaggaataaagcatgagtacaaatgtggggaggtggccaaccctggggatgctaagccttcaggacatttttggatctaggtggcctaccagtactgaagataaaattacacagcatttagcacacaagtacagagagatggagaatatgaaagagtgaataagtcacaagtggaatgaagtgagaagttagaatggagtgtcaggttacaatcatgaagatgatagaggagagacattattcaaagttataatgtctacaggtttttcaaaataatacacaggaagctcaaagaacagcagtctgtgtaaattaaagaaacctgtgcttagacatagcatttagactcagggtagaaatctgtagtagtccattctcacactcatctgaagaaatacccgagactggataatttataaagtagtttaattggctcacagatccacaggctatacaggaaacatgatgctggcatctgctcagtgtctgggaaggcctcaggaaacttagaattatggtggaaggtaaagggggagcaccacttcacatggccacaggagaaagagaaggggggtgctccacacttttaaacaaccagatctcatgagcactcattcactatcatgagaacagcaccaaggaggtagtgctaaaccattgatgaatcatgatccaattacctcccaccaggccccacctccaacactgggaattacaatttagcatgagatttgggtggggacacagatctaaaccatatcattccgccccaggcccctcccaaatatcatgtccttctcacatggcaaaatacaatcatgccttcccaacgttccccaaagtcttaactcattccaccattaactcagaaatccaaagtctgaagtgtcatctgagacaaagctagttccttctacctatgaacctgtaaaatcaaaaacaagttagttactcccaagatacaatggggatacagggattgggaaaatattcccattccaaaaggaatatatggaccaaaaaaaaggggctacaggctccatagaagtctgaaacccagaaggccagtcattaaattttaaagatccaaaaaattgttatttggctccatgtctaacatccagggcacactggtatgaggggtaggctcccacagcattggacagctctgtctctgtggctttgcagggttcagcccctgcagctgcgctcatgggatggcattgactgccttcggtttttccaggcatatatggtgcaagctgtcagtggctctaccattctgaggtctggaggacaatggcccttttctcacagctccactaggtagcaccccagttggaactctgtgtgagggctttaaccctgcattagccctccacactgccctagtagggaattctccatgagggctccaccactgcagcaggcttctgcctgtacatccagacttttcatatatcctgtgaaatctaggtggagactcccaggcctcagttcttgtcctctttgtagccacaggcttaaaaccacatggaagccactaaagtttgtggccaacatgctctgtagcagcagcccaagctgtacccaggcccctttgagccatggctgaacctggagaagctgggatgcaaggagcagtgtcccgaggcttcacagggcagcagtgccctggctctggcccatgaaaccattcttccctcctaggcctcgagaggggctgctgtgaaggtctctgaaataccttcaaggccgtgtccccattgtcttggctaatagcacttggcttctttttaatttatgcaaatttctgcagtctgtttgaattcctcttctgaaaataggccttttttttttctatcacgtggccaggctgcaaatttttcaaacatttatgctcggcttctcttttaaatttaacttccagttttaggtcatttctttgctcacacatatgagcataggatgttagaaacagccagaccacatcttgagcacttttcctgcttagaaatttcttctgccagataccctaaatcatcactctcaagttcaaagttacacagatccctagggcaaaggcacagtgcaagccatgttctttggtaaggcataacaaaagtgacttgtactccagttcccagtaagttcctcatttccatctgtgtccttgttagccttgcctttgctgtccatatcactgccagcattttggtcataaccattcatccagtctctgggaatttccaaactttcagtcatcttcctgtattattctgagccctccaccctcttccaacctctgatttttatccagttcaaaagtagctttcacattttcaggtatctttataagcaatgccccacttgacagtaccaattttctgtattggtccattttcatactgctataaagaaaacctgagactgggtaatttataagaaaagaggtttaattggctcacgggtctgcaggctgtacaggaagcatgatgttggcatctgttcagcttctgggaaggcctcaggaaacttacagtcatagctgaaagtgaagggggaacagggcttcaaatggccagagaaggagcaagcaaactgggcgaggtgctacacacttttaaacaaccagatctcacgagcattcacttactcagtgtcacgagaagcggatggtgctaaaccattcatgagaaaccacccacatgacccaatcacctcccaccaggctacacctccaacactggggattgtagctgaacatgagatttgggtgggcacacagatctaaacactatcaacattgcaacaatggtgttagccaaaagatagtgaaataatgtcttcataagaaaaagcagttatcaacttggaatttttaatgaaataaggacatttattatacaaacaaaaatagaagattggccaccaaaagaccctcctcactaaaggaacttctaaaggatagacttcaagaagtaattgaaaatggcctccaaaaagcaatctgaggtacagaaagaagtgatcaataaagataaaagtaaacattaaactgacagtagcatgttatagaaaaacaatgatgcctgtttcaatagcattaaaaaaaagaaaagccaaagtaaggttagaggcagattgttggaatcaaaaccctaaaagcttcttgtattttcaagaaggaaagcaattgattgtctttggaccttaagtatgcacagtaaaaactgcagtgaaaagatgggctcacatgtaaaatggtgtcttttaatcaaactcagtaaacactttctcacggaagatacctggatattaaaggatgtcagcctattgattccccacagcccttgtagttaaagcctgtcagttgctgcattaggtttcctgtcagtaatcttttcactcttcctctcatcaagttcattatgtgaagttacaactctttacggacctctgtgtgtttaataaaacacacgtgctgtgaaatcactttaactccttctacagtcctcatgatgaggaccagtgcttgtcattcattagcatccagctcattgtgttttgcttgaagagcctcaccaagggtccagtggcaacagcggcactgtatgtgtggttgtcaaatcagagcagttgcacctgctctagagagccttcccagcccactttagtgcacagtagtcccttcttcccctgaattctgcttgattgcacccatctgtctcacgtaagatggaagtatcaatagtaccttactcttagcattacggtgtgagttaaatggattaataagtgtcagagcacttagagcagtgcttttatagcacaccaactaaataccgttgaataattgctccctagttatctttttgggaggattataggttgtttcatccatgtgttagattactaaattgtaactggccaaagataaggttaagttttatacttctgtgggaaatagaaaagtagactgcagtaagtgagtacaataagtaagtcagttactaagtaactgacttagtgggcattagtcactcatgggtgacttttaaaatcacatttcgcttggagagctctttggaatctctttgtagtaggcttagtgtagtaatgagaaagagctgtttaaaattttgtaaacatgtacttggattaattgatctactgcgaaagtagaaacgtagatgtgtagatttttgaactaaagggatcgcaagatgccaataaattagttttagggctcggggaaagcctttgtacttcaggacctatggctcttctgttaaaaacaaaaatattttctccaggttccattccagcattagccaatgctttgccttcagttctaggaattacccacattttaaaatgaagcaaaagtacagcagtagagtgacttgttaggggctggtgggtgggaggatagttttcagaccaggtgagattgtgaaggggctggaaaccagctggtctgctttcaagtcaggtgcctcctgcacactgtgccacctgaggccctgctctgcagcagccctctcagccctggtctcttctgtgtgcgcagtgctcatgttggcagtatcagaatttcacatctattgaacaatgtagtgaatatttattttatatgtgatgtatggttatctgtttatcttagttgcttttttgctttataacggaaataatggtatgcttttttttggttatatgtatttttagtatacctttaagcctcacctagtggaggcagaagggatgatatttattatctcccttggaaacctgcagggtggatattttgaatcctttcttgccaggtggatatctcagcatggtgttggcaggattgcctgtgttctgtaagtggctattcacctagttccaagtctaagaattcttgagtattcagtcaaaagagatttaaaggatttggttgacaataatgtactttctaatgtaatcaggtatccaggttaaagacagaccacagacagccacatgtttgatacaagagcatgagtaaatggctctccctgtctatttcagcagacatgtttagaaaaatgatattcaagcaataacattttccagttatagattttaattgtattaagataataaatcctaaactgttttgctaatctattgctttttgctttagaacaatttgtaagagtttatacaagtcagtagagaattcatatccagaaaaatataaacagaagaaatctaaggacttctgaaataattaattattttggataatttgtatgattgtgtttaatgtctgtcttgcagtatactcgatttggtgaattctaaagatgaaggatacctcctgtcaagtcatacatagtctagtgaaagagacatttagacgaaaatagtacattacagcaagatcctcagtagagatatgcacaggttgcaataggagtaataacatttaaacttgcactctggttgaggggggtatgggagaaatgccaaaagtggtcctttcatattctgagactacttcgtgatttctagagtctctgaagaagctataaaggctctggtacatgagctctttaagctttctcttggattgctatgtatttccagtatgcttcctgtgcttacccagtctgttgtcagccatgctacctggtttttcagccttctactcttcctagttgtgggaccattagcaagttattgccttgtgtttcagttttgtaagaagagagaaatagcaccaacctggtaggagcattgtaaatattaagatcgtatatggaaaacattttagaatgccgcctggtacaccataaggctcagaaaattttagttcttattgttattactttcggtagctaggtagaatattgaaacactgtcaccatgttgatcatttagattctctttctaaaatgctgatgtcaaataaaattttacattttttccccctttctagctccaagaggaaaacgaggatggaaaaccttttatgctgtactgaagggaacagttctttacttgcaaaaggtaaaagtaaagcagataaaaaatccacaaaactcgatgaaataattacatgaggtccagtatatgtatgtacggtagtctcccttatctgtggtttcactttctgcagtttgtttgctgatgttaaaaaattttcagcggagaattccagaaataaacgattttaagttttaagttgcatgctgttctcagtagcgtaatgaaatctttctcaatcctgctgcatcctgaccagctgtgaatcatccctttgtccagcatagccatcctatatatgcccatcctttaatcacttaatagacatctctgtgatgacatcagctgtccagctatcgcagtgtttgtgttcaagtgacccttattttacttactagccccagagaacagtgatggtggcatattgttatcattgttctattttattattagttattatggttaatctcttactgtgactaatttataaattaaattttatgttaggtatgtatgtataggagaaaacatagtataccgtcatccctccatgcacacaacagattggctccaggacgccccttaaataccaaagtccccacatactcaagtcctgcagtcagccctgttgaatccacatataagaaaagttggcttctgcatactcgggtttcacgccccacaagtgccatattattagtcctcatttgatggaaaacagtctgcatattagtggatctgtacagttcaagcccattctctttaagggtcatctatatatagggtctcgtactattcaaaatttcaggcgtccactgggggtcttagaatacatcccacatggatagataaggggagcctactgtagcacatattctttattcatcgttcagtggacacttaggtcgtttccaccttttgtgagtaatgccgcaatgaacatggggtgcaaatatctcttcaagatcctaatttcatttcttgtggataaatacccagaagtgggactgtggggtcatatggttctgttttcagttttttgaagaaactccatatggttttccaaagcaatgtaccattttatacctgaacaacagtacataagggttccagcttccccccatatatgtgttgaatttgtctgagctctgtgttccattctgttggtctatgcatgtgtctgtctttatgccagaaccatattgatttgatgttgtagcttggtaatatgttttgaaatcaggaatgtgaggcctacagctttgttcttctttttcagtatgatttatggcttattcagagattcagagtcttttatgattacatataaattttggaatttttttttctttttctgtaaaaaattccactgggatattcacagggattttattgaatatgtaggtcgctgtgggcagtatggacattttaataatgttaaatctttgaatcctgaatccctgaagatggaatgtcttttcatttatttgtgtcttctttaatttctttcagcagtgttttatagttttcagtgtatatgtcttttgccttcttgatcatgtttattcttaagtattttttaatagtttttgatgctgttgtaaatggtattattcatttccttttcagattgttcattgttagcatatagaaatggaactgatggttgattttgtatcctgcaactttgctgaatttatttattctaataggtttttggggaatctttgggttttctacatataagatcatttgaaactgtatctgttttgagggtttttcaaatcatgaaaggatattaatatcatcgctttcctgcatcattgagatgtttgtgtaatttttatcatttgatctgttaatgcgttttatcactttgactgattttcatatgttgaaccacctttacatcccaaggataaatctcacttggtcattgtatatgatccttttttttttttttttttttttttttttattatactctaagttttagggtacatgtgcacattgtgcaggttagttacatatgtatacatgtgccatgctggtgcgctgcacccaataatgtgtcatctagcattaggtatatctcccaatgctatccctcccccctcccccgaccccaccacagtccccagagtgtgatattccccttcctgtgtccatgtgatctcattgttcaattcccacctatgagtgagaatatgcggtgtttggttttttgttcttgcgatagtttactgagaatgatggtttccaatttcatccatgtccctacaaaggatatgaactcatcattttttatggctgcatagtattccatggtgtatatgtgccacattttcttaatccagtctatcattgttggacatttgggttggttccaagtctttgctattgtgaatagtgccgcaataaacatacgtgtgcatgtgtctttatagcagcatgatttatactcatttgggtatatacccagtaatgggatggctgggtcaaatggtatttctagttctagatccctgaggaatcgccacactgacttccacaatggttgaactagtttacagtcccaccaacagtgtaaaagtgttcctatttctccgcatcctctccagcacctgttgtttcctgactttttaatgattgccattctaactggtgtgagatgatatctcatagtggttttgatttgcatttctctgatggccagtgatgatgagcatttcttcatgtgttttttggctgcataaatgtcttcttttgagaagtgtctgttcatgtccttcgcccactttttgatggggttgtttgtttttttcttgtaaatttgtttgagttcattgtagattctggatattagccctttgtcagatgagtaggttgcaaaaattttctcccatgttgtaggttgcctgttcactctgatggtagtttcttttgctgtgcagaagctctttagtttaattagatcccatttgtcaattttgtcttttgttgccattgcttttggtgttttggacatgaagtccttgcccacgcctatgtcctgaatggtaatgcctaggttttcttctagggtttttatggttttaggtttaacgtttaaatctttaatccatcttgaattgatttttgtataaggtgtaaggaagggatccagtttcagctttctacatatggctagccagttttcccagcaccatttattaaacagggaatcctttccccattgtttgtttttctcaggtttgtcaaagatcagatagttgtagatccttttaatgtactgttgaattcagtttgccagcattatgtttagagtttttgcatttatgctcataatggatgttggcaagtagttttcttgcagtactgttttctggttttgatatcagggtcatgctggcctcataaaatgagtttggaagtgttccctcctcttcaattttttggaacagtttgagaatgattggcattagttgtttaactgttaggtagaattcactggtgaagccatctgctcctaaactttcctttgttgggagggttttcattacagattcaatccccttattattacagatccattcagattttctacctctccgtaattcatcttggtagattgtaggtttctagtaatttatccctttcttctaggtttcccaatttgttggtgtataattgttcataacagtttcttagaatccttttagtttatgtggcatcaattgcaatacctcctgtttcatttctgattttatttatttgagtgttctctgtttttttcttagtccagctaaaggattgtcaattttgttgatcttttgaaaagaaatttttagttttattttttcatttctctatttcttttatttctgctctaatctttgattagattttcatttctctatttcatttatttctgctctaatctttactgtgtctttcctgtgctgactttgattttcatttctctatttcgtttatttctgctctaatctttattgtttctttcctgtgctaactttgcattactttatctggtgtaaaaacaggttgtttatttaaatctttcttcttttctaatgttaagtgtttattaccataaacttgcctattggtactgcttttgtttccttccacaagttttggcatattgtttgtccatttttgttggtctcaaattattgtccaatttcctttttgatttttttttgacccattgattgttcaggatcatgttgcttaatttccacatatttgtgaactctccattttccttctgcttttaatttctacttccctttctttgtgattggacaatatatttggtattatttcagtcttcttaaatttggtaagatttgttttgtaacttagaattttatctatcccagagaatgttccatgtgcacttgagaagaatatatattctcatgctgttgagtggaatgttctgtatatgtttgctaggatatttggtgtattgcatttttgaagttctctgtttctttattagtcttctgtctagaagttctgtacattatagagagtggggagtggaaatctcctactattgttaatttctaccttcagtcctgtcaatgtttactctatatatttacgtgccttgatgatagatgcatatgtactaataatggttacaactgtgtggtgaattgactcattattatatgtcattctttctctcttgacagttttttacttattttgtataatataagtatggctacccctctgctctttttgttaccaattgcatgcaatattttttccattatttcatgttcaggtgtgtgtgtctttaaatctaaagtgagtctcttgtagacagcttatacttgggtttttttttctctctctctctgcatctgtccctccctccgtctgtctctgtctctctgtctctctctctctcaatacattcaaccacactcccagctgtgattgggagtttaatccattcatatttaaagtaattatcgatagagaaacactcttgctattttgctatttattttctgtcttgtcacttttttacttcactcttattagtattcctttttttttttttttgtaataacatttctttattctcattttcttttgggtatcttttagggttttttttgtttgtttgtttgtttgcttaccatggggcttacataaaacagttataatgatctattttaagctgataatgatttcaggtcatatgccaaaactatacttttactccgtcacaaattatatccttttgtattctgttcccactaatgtatatttataggtaaagtattttaatactttttttaaaatttctataccagagttaaaagtcatttacacaccactattacaacattaaagcattgtatatttttcctacatatgctcagcactgcatatcagtgattgctgcatttgaattcaaccaacctgagattgaaatattcagaaaaaaaaagttccacaaagtttcaaaaaacaaaacttgaattttctacatgctgagtactatgttgaatctatgccaatgaagtgatgtgtaggccttttattaggtatcatgagtaatctagagatgatgtaaaacgtgtacagaaggatatacatatgatatatgcaaatactgtgtcatgttatgtaagtgacttgagcatccatggattttggtgtccatcaggggtcctagaacaaatctcccacggataccaagtcctgtctctgtttacttttgctattgagctttatactttcttgtttctgtttagcattctttcatttcaagttgaactccctttagcctttcttgtaaggcaagtccagcagtgatgaactctctcaactttcgtttacctaagaaaatattatctttctttcttttgtatatatataatataatatataaataatataatatattatatataatgtatattatttatatattatataatatattatatataatgtattatattatttatatattatataatatatagaatatatattatatattataatatatattatatataataatatatattattatatataatatatattatataatatatataataatatatattatataatatatataataatatatattatataatatatataataatatatattatataatatgtatataataatatatattatataatatgtatataataatatatattatataatatatatataatatatattattatactttaagttctagggtacatatgcacaacgtgcaggtttgttatatatgtatacatgtgccatgttggtgtgctgcacccattaactcgtcatttgcattaggtatgtctcttaatgctatccctcccccctccccccgccccacaacaggccccggtgtgtgatgttccccttcctgtgtccaagtgttctcattgttcaattcccacctatgactgagagcatgcggtgtttggttttttgtccttgtgatagtttgctgagaatgatggtttccagcttcatccatgtccctacaaaggacatgaactcatccttttttagggctgcatagtgttccatggtgtatatgtgccacattttcttaatccagtctatcactgatggacatttgggttcgttccaagtctttgctattgtgagtagtgctgcaataaacgtacgtgagcatgtgtctttatagcagcatgatttataatcctttgggtatatacccagtaatgggatggctgggtcaaatggtatttctagttctagatccctgaggaatcaccacactgtcttccacaatggttgaactagtttacagtcccaccaacagtgtaaaagtgttcctatttctccacatcctctccagcacctgttgtttcctgactttttaacgatcgccgttctaactggtgtgagatgatatctcattgtggttttgatttgcatttctgtgatggccagtgatgatgagcattttttcatgtgtctgttggctgcataaatgtcttcttttgagaagtgtctgttcatatccttcacccactctttgatggggttgtttgtttatttcttgtaaatttgtttgagttcattgtagactctggatattagccctttgtcagatgagtagattggaaaaattttctcccattctgtaggttgcgtgttcactctgatggtagtttcttttgctgtgcagaagctctttagtttaattagatcccatttgtcaattttggcttttattgccattgcttttggtgttttagacatgaagtccttgcccgtgcctatgtcctgaatggtattgcctaggttttcttctagggttgttacggttttaggtctaacatgtaagtctttaatccatcttgaattaatttttgtataaggtgtaaggaagggatccagtttcagctttctacatatggctagccagttttcccagcaccatttgttaaatagggaatcctttccccatttcttgttcttgtcaggtttgtcaaagatcagatagttgtagatgggtggtgttatttctgagggctctgttctgttccattggtctatatatctttcatttttaaagggtagttttgctggatgtaatatgcttgtgtggcaagtgtttttgtttgtttgtttgtttgtttgtttttttgagcaccttgaacatatcatcacagtcacttctggccctggatcatttatgctgagaaatacacagaccaatcacttttcttttgctactttcaaagtcctctgtttttctttgactttttataatttggtcattggtcccagtgtaatttatttccattaatcctggttgtcattaggcttctcgaatctggatgtctgtttccttcctcagatttcagaagtgttcggtaaataagctttgtgccctctttcttctttctgctctttcttggatttccataatgtgttggtctgcataatgatgtgtataaggctctcttaactctttttcattcttatttatctttgttctctgagtggataatttcaaatggcccgttttcaagtttgctcattctttcttctttgttttctgctcttgagcctctcatctgaatttttcatttcagttactatattcttcagcttgaaaatatctatttagttcccttaaatattttctctttgttgatattctcattttgtttattcatctttttttagcttgttgagcatctttacagtgtttatgcaggtaattcttatacctttgtttctttacggtcaatttctggaaattcattttgttccattgaaccatgttttcctgtttgttctgtctcttgtagctgtattgggatctgcacatttgaagaatcagccacctcttccagtatagagactggcttgctacagcagaagcccctcaccagtcatctttgcaacagattttagggaactctgaatcctttttcaggagcccataatccttgcaccctttgatgtctgtctgcaacactgcaagttatctgattttagagcaggaagctacccagctgtcccctgttctaagcagccaccaagtgtatgccatcagttccctgaatcaggagagtcagataccactccctcagatagccctccaaaaagccagaatgctggatgcatactctgctcctctctctctccctcccaagggagaaatcaagtacactaagtgtgccagccacagcaagccacctgtctctctactctgttctaagtgtccttcaggcttccaagctatgctagttctgttagtgctgtgagtgaggtgagaaagaaattagtcccttggggccaagaagagctgaaatgagggccacacactctacctttcttcagccctcccaaagtagaagcttcaggttgaccaccttttctcccaattgcatcaagctgtgctgactgcagcgaaccacccaccactttcctttgttcttagcagtgcccaggtatccacactattgcagttccctcagtattccaattgaaccaagattaagccattacccaggcagccctctgaaaagccagaatagcaaagacctctttcctttcccccatcagagatgtcaggggccagggcattctcttctggtgctgaggcatgctagcttcagggaggggttgatgtgggtaagatgaaatcactcttcttacctgtttcagcgtgggtttcttggctttgtgctctcctggggtactacaacctcttcactggattttggtattgtcttagtaggtattttggtccataaatcattgattactcaatatttttattggggagatgggagctgggactacctattctgctgtcttgctaacagcactcccaggaagagactgtttaaatctatgtggaatcatagtataacacagttttggcgtcttattcttttcactctgtatgttatcataaacagtttcttattaaaagttttttagaaacatttttggttttcatcaatctggtatttggtgactgtgaaatgatatgtaattatggttttgtttcttctgtccctagatcatttataaacatattcatttttaaatgcatgtagtattttttgttaaatagatttatcataatttaacttttcccccactttcagacatactcttttttagtttttcatttataaaataacactgcacacacacacatgcacatatctcttttattttcttaagattcctaggggtgtcatggggcacatggtaggaactgtttacagttctgaaaacatatttctaaattacctccagaaagattatacctaatgtcattccttacagaagtttgtgacaacatgtctgttttcagtgtattattgacatatgggtattcagaggaaaggatctgaaaggattcattttgaacttcttgtttttggtgtttgtccacgaacacatgtccttccactctttacacactgctgtagttgcctttccacacctgtgtttctctggcaaagaggcctcccgtttgatttactatccgcagtactgaatcagatggcgacccctcatggtatgcacgcttgcaccactgagatgatcaactgctttggaatggagactgggaaggaatacatttgatttattgttattttaaatttttcaaaatattataataatgccatatatgagattgaaagaattattcttttttaaaactagccttcctttgtccacccagatctttatttaaaggactttatatttcaactatactgtatcttttttgcttttttattgttgttgttgttgttttctttgcttgtttttgtttttttacaaaagtttatttttaaatgttcaacagattccaagacagcacttcattttagctgtaggtggcaaaatatgttatggcagggaatacagatgtttaagtaagaacggaaggcaaggatcaccatcacctcagacgcaaagaacaacttacttgtggacagatttcttaaatcaaccttttgggcaggggacccttgcccacagcctttgctttcagctccagagtttctttgtcttttctttttgtttctgcttagaagccctcgcctcctcgcccatctccttggctcatttcagggctgcttcttgccactttgatggctggatctggtgcctgccaccccttctccagaccctgccactggaaacccatatctttcattaacattttacatattaccagagcagctttgtaaacaacatttttataattattttttgttttattttttatctgaactgttttcaagtgtccaaattaggaaggaccatatctaacacaaacccttttgtcatcttccttttggaatacatcaggtaaggaatattggagcatggaatgcttcaccttagaccatgatctctttttgggaaaataggctttgtagaaagagatatggagttagctgaaacccaaagatcacaaagtaaatgatttgccgcatccttctaaaattctcacattactttgagggtcatgacaagggagaaatggaggcagttgttgatacttggagattatccatgctcttaggtggctggctatctcatactgtctttattttcctatggagtctataagcttgttttcctgtggagtcctataagcttctagtttataagtcagctactctggcctctgccagatcagcatgtgtgtacatgctgggcccacactggtccttttagctacctttgtctctgcaaggaagaaccctttgaaattaaatttcacatatcacagccatttccccagcataaattccactctcttgggtcacttctttattttgtctaaaatctgtgttaaggggcatagctgcctttggcaaaaccgtttctctgaatacctagccaccggatttccacccactccatctcagggtgggcctgggaagagaacactattctcacattcaacatttgagaggagtgatgccaagaaagatgctgtttcaaaggtaccagcttttcctacatcactgtcctctccctcagataaatgtattgggagtttgagtcatcaagatggagaatgggttagtattgacaagggaacaactttgtaaactttgaagcttcagcatcagcttggattagagctccaagaaggttgcttctccggatttatgatagctctggagtgtggcaaatgtgcatttgggcaaagttgggtgaaattgcttttataaagagaaaagcctggcagtaaggaaattatacatttatgaagagtgaatagtagaatcatgggttattgttcgggttgctatttcagttaaatcataagaatgctagcatagctgtaaactatctacttacaatgagaataagcctgcaaaagggtggccatgtttaataaccagtctccactctcttcttaatgctcttttttaaaaaatcagaactaatatatgttcctggaaaccttgcacagatcctagagactaattcctcaatcaatggaagcttaaacttcatagttctgtgtcttgtatggctatatctacctgattgtgtggtttctacctggttctgtagtttcttcttaatctgtaaaactaaaaactaaaaaggtaggtagactgtacaagaaggaagaccttatgggcatctacatctggaaatgccactccctcttaggttaataggatactgcctgctgctgagcagacttttgcatcatagcgttctttggggtatcgagccatccagcagaaacaggagtagtagatagttaaacttcttccccttggccaggttgtagcatgtgttaagggctaatcctggtgatgtgtgcatcctacagggagttactaatgtcccactgctggttaatccgtccccctggttggaagcctaatctaccagcatgtgatagcagatgctacacaaaaagtaaattatatgattacaaggtggtttggggtttatacagtttgggttttatatcctcccaaagctatttatcacatcaggtactgtgcaaaattctaagcttccaaagacaactaagatacaatccctgcctacacagagctcacaaaataggaggaaaacagataaattgagcattcactaagcaatgagatgaattaatagaggcgtggaaaaatcttactgaagaaggccccctaagcatacttgcaaaggtcagaagatgcctccctgaggaattaacatgacttgaactgatgcctgaaagataagcaggagtttgccaggcaggcaggcgagaaaaagcattttagcaagagaagggtgaaaatagcagatatgagagaatatggcatattcaaagagtggcaaactactttttacatttgcattataggctggagggggagtagcaagcagtagaaagatgatgaaaaaaattatgtttcaaatgatgaaggtatcacgaaaattaaagagatggtatcacaatgtcataaagtgtcccatttacgaaagaactgttttcttccctcaaggaatttcaagctctttgagtgagaggtcattgccgctgccacctatactcaggtactcaaaggacttaggtggcatagtgtcccccatgctaagcagccctcctcacaggacctgtgtggggcatgtgacctgggagtgccatgttgttctccgctctgtgctcttaggatgccagtatttacactcctaggattccagtatagcagaaatgtctctccttcttcttcccttcttcagccaatcccccactatttgggtgaggagaggagaaaaaagccctggcccaaagttagtgtcattcagtttgacaaaagctcactcatttggcctcctgtgtaacaggggctttgccagagatggggatgcaaagatcccaggatccggcgtctatccttaagggcctcactagcacactcaggctctacatccattctctctttctccacacctttctaccccatatacatttctcagcatcaaggaatcctgtccaagggcttccagttaacttccctcctgagtgccctccattttcccccttgcggctgccaacgtctcggccttggggataaatgaggggggtagtactgcctgagacagaaggaaacagggccactgcttccctgattaaatgaatcaaattggtcttcgaaagaattcataatggctggcaattccagccattccggaagtccataatggctggctttgaagaccaccttcccttcattgtaaacacatatataccacacacatacacaaaccaccccctgccccacccactggaataacaatctgtttagggtctcatttcattattagttgctcatcagttactttaagcctttcatcaagacttctcaactacgtaatagcgtataatgatttttacccatatagaacaattcaagaataattcaattcgcatttcttcattacaaatggagagtaatagtaaaggctttccccctccgaaaaacaaataaacaaaaaagtcacaatagtcatcagaaggaaaactaggcacagctgaaattacacaggagcgagtgccaagtcctcacagtctccattcgctcaacctctttcactactcccatcccagccaaagtggcttgttgcaaaggtttttggccactcctacaggaagttgaagcattaataaataatatctcatgcctcttaaggttgtggccgccctgtgtttatgctcccatatgttgcatgcctcctgaacacatgggcacagtgtcggcagcctcttaggtattaaagtaagagctttgttaggctggggatcgctctccccagcttcctcagatccccctaggaaaatatatctcttggaagagcattaaaaggctcttccaaaagaagagtcacaccttgaagagttacgaagagtcatactccagtaagtagacatgccttgtcaaactccaagtctgtcacttaactaattgctgatttggagcagttaattatcctctgcgaacctcaactcatttctgtgtaaaatgaggggaaatgatgttgcatggttgatataaagaaatgattaaatacatgaaaacacctgttgcacagtaggttaatagtaaatattggttcccttcctgacgactcttataagaaatgagagtattttttcttttagtcctttcttgattattagtcatctcataaggaataaagtgtctggtgtggttgggcacagtggctcacacctgtaatcccagcactttgggaggctgaggtgggtagattgcttaagcccaagggttcaagaccagcctgggcaacatgtcaaaaccccatctctacaaaaaatacaaaaattagccagacatagtggtacttgcctgtggtcctagctactcaggacgctgaggcaggaggattgattgagcccaggaggcagaggttatagtgagtcaagattgggtcattgcactctagcctgcgtgacagtgagagcctgtctcaaaaataaaataaaaataaagtgactggctttattcagaccttattttcctcccttttcacaatcttcctacagcagtctgtgtatgaaatgattaagagttaggccttctcaaccatccaaataaaggcccttactttccctggtacctttattgaaaaataagtaatttcttctacctttgtttccacttcagataggagacaaatgcctccataaatcctcctagcactagtgccaggcaaggcagagggcttcgtgttctggagctagcgatgtggcataaacacaggtcaaaaataccatatcaccccattcctcattcccatagacattaattatatatatgacatgacttctacatacttgtcttctagttagagaaattttaccaaagatcagacacatgcctccgctccctctccctctcaccacctcaaccctggatatttagatagtccctttatgaaaaaataagccataggctctacatacccgttccatgtagcaaaaacatgaaacaaataagcacaaggagccccccacctttttgaagagacatttaagagcagtattcccgtattaaagaaagcccacatagccctgcagagcatttctgtatatttcatatctaaaagaataaccactcccagatcagagcattatacatcacaaatgtaggaaacggcttggcagattgcctgagccagcttgcttcattggccatttagccagaaatgagactggtttgttagtataataggttgtaggttacttcttccatctgagcttcacaatctcatagaaggatactgttcccattttttaaattgaaaagctggcgttctaaagttgattaacctactcagtattgtaaagatggtactagccaagctaatatttttcccattagtgtcttcttaagtaaatatgaacactctagtgtgagagccttgtaattactggaagtttaaaatgctgttgtggggagaggtctctaactgttatgacttcacccagcttcaactaacttggccactgcacagcaactgtgcattaactttccttcagcctctgacttgaataaagaatgatggctttgccctttctctgattgcacttgcctggctccagccactctttcactgggatatgagactttccactctttcactggaaaatgtctcgtatcttctattagttgagtacataaactttgagattttctaacatagacctttttcaggtctattgttcccagaaaccatgaagtatgtggaactgttggcatcctattttatatctctcagattgacacttaaaatatggcttaagtatccagtatcagctgaactttggctagtaaactacctttctgatacagagggccataaatttacctaggaagcaagtcaataatgagtgcatatataagattaggactttgcccgtcttctagaatgttgtatactagagatatgattgtgagcaagatacggtgcccaaaggagctttcttcttcattctgaagaaattaacaaacaaaaggccaattcagtgcaatttgagaaatgctacaaagagaggagggtgctatggaaacacatatggaagggcacttaacctgagcaagagaagggaagctcatgaaagagttcatgaagaaagtgatatctaaccccacacttaaaaacacaaatggaagctagtcatataagggaactcagagacaaacgtgtatggatacttagatgtgatacagcgtgtttggggaactgcaggttcagtggtgtttgaggcagaagagcctagagaaccatgttaaagagttgagactttatcttagagcagttggagctatcacatgttttaaatggggagtgacctgattattttacttatttttttgaaactaggtctcactctgttacccaaactggagtgcaatggcggtgtctcagctcactgcagccttgaccccaaccaggatcaagcagtcctccaacttcagccccctgagtagctgggaccaccaccacacctgactaatttttctattatttgtagaaacgggatctcacttcgttacccaggctggtcttgaattcctcaacttaagcgatcctcctgccttgacctcccaaagtgcagggattataggtgtgagccaccatgcacagcatttatatttgtattttaaaaagatcaatctgggtcagatgcggtggctcacgcctgtaatcccaacactttgggaggctgaggcgggtggatcatgaggtcaggagttcaagaccagcctgaccaacatggtgaaaccccatctctactaaaaatgcaaaaattagccaggcgtggtggcacgtgcctgtaaaatcctagctactcaggagtctgaggcaggagaattgcttgaacccaggaggtggaggttgcagtgagccgagatcttgccactgcactccagcctgggtgacagagcgagactctgtctcaaaaaaaaaaaaaaaaaaaaaaaaaaagatcagtgtggctgcaggttggagaatgacttggaaacaggttctatcaaagacacagagaccagattaacttgaacaagggcaggggtaagatggagggggaaacatagctctacttggagagtttagtttgaggtgttgaattcagagtgtgtggaataataaatggatgtgtccagtaagcaattatgcatactttgatctggagccaatgaaggggccagaaatgcagatctgaacagtcattaacaaaaaattggtaatttaagccatgcaagtagatgatgtcactccaagagtgaggagaagatggaggacagagccagtggaccatatactcatatgtgccctaggaggaagagaaaggaggaggagcctgtgcaatgtggccagacagctaggaagaaaactaagccagagagaaaactggtaccagagatgttaagagatgtttgaaatgtgtcctgtcatgaaaaggtaagatagggaattggagagtgccacgtcaattcagcaagtaggaaattatcgataaagcagtttcagtgcagtggtgagcgtggaaggcagattggagagttgaggatgcagaggcagagaggacatagacaactactctcgagaagctcacccagaagtttccagtttgatccactccactcctctttttctcatattccccttcctgtgacttttgaaaataataagtccccggtgtctgtctcatttccattgaatcttgtttctttcctgttgttgattgaactctaaagtaaagtaagtccttatctttgttcctttcccccagacagtttcttacattatccagagctcttgttttgcttctctgagttacacacaatctgcctcatcaccatttgcctcattttcctttctggccacttccttaatgttacttagtcacatatgcctttcactttcaagcaaagagtaaatccacggagtatcacgatagtaatgtcagatccctttacaaaatgtcatgttgggagctatgtgagaaataaacatagcgtctggtccctgaaaacacttgtcctgacagtgtggatgagaagaccagtattatgcaatgaatggctagtggactcttaaaatcacctggtgaaaaagcaccagttaacatgatgtaaaccaagtgtataggtgaaggttggagaaaacacagggtgaatggaataaattcgggtgaacacttctttctacttgctataactctctgagatagagcttgtgatatacaacaccagcataggggctgatttaaatatttgcacatttcaaaactgttccagagtccaggtatcagtcatgatctggcataataggacttttatggtacagtgtttctgtctgttttatagctaagtaagagcacactcctatctgtgttttttctagtacttgcagtgcccctgagcccaagagtacctaaaaaatgtgtgccctattggtagttaattattactatgggaatgtgaagcgttcatggaagaaaagacaaatattattttaatataatactaatagttcatatgtgctttaaaaattagaaagtgctatgaattgaatgtgcattttaattgacattaaaatgattccattcctgttggttctgatgatccatcatggttgacatttgggtagtaacttcatatccacttcgttacagagtgagtcatccgctagccaagtgctttgacaagcctttgctatcacaaagcttcagagtttctctctcagtttctgtcatgggctttgtgtctgtccctgccagtctctgcttctctcttgaaagtatttttgtaaggcttgtgatgttattcttgttccagttctggttgttacaaaactgaactgccctagagatgattgatggaatggttaagagcgacgggtgtaggtggctcgttagtgcatggcagtgaattacttagagttcacctcttgattattgtagtctgcagatcaggctctcaagaatctctatgtgattttatctttagggtctagaaagcagctgttcaaacctgaatttatttacctttaccctgtctttagaagtgaaaaatcagttcgttatctaaaacgtacatttactatcacagatcaggaactgtgtccttggtgcagaatcatctttattctctggcttactcggaagagagattttgttccacctgcctataaggggtttttgtttgtttgtgttttgttttgggggcttgtttttttgtttgttttttgacacagattctcactgtttcacccaggctggaacacagtggtgcgatcacagttcactgcagctttgacctcctaggctcaaccaataggttttgtaaaagtttaattggaattaaactttttggtttttacaaaaccagtaggttttgtaaaagtttactgggtcgcatcaggggagggcttggttcaggcacagaaggaagccactgaggattcaaggcctcccagactgtgatgacagcaatcagtctggagctgatgtgcccaagactgtggcacccggagcaggtccatctctggcctggtctcctgtcactcatcctgctttcttgtgagctcatggcgtttttatttccttttgtgaaactgctggttctgtgctcttttacatgttgaaatagttattaggacgaagctgaatgagttttagaaagacgcctaatcagacatacttagcattttttaaaaaagatattcatcaaattataaaaaacatttttaatgccagtttcaaaaccatgaattaatagacaatttaggacccagcttgctttaattactaacatttttattaatttccacatagctccaagtaacaatgtggtctcactttccctttttatattctctcagtggaaatcaagaccatttcaactgtgtttaaaattgttttaagtacatgtagctattttacctatttaatgaggcatgaagtaaatagtacattgaaaactggagtctttaatatgctttttaaattgataagaattttaattacaatttggtcattttccaaattgtagtttatattacctgaaagtacaatttttcagacttgatgccaattttttgtacatatgtagatgatgtttatgttagtgtgttaagattcaacttcacaagaggtttaattaacaagtttctcagggaaaaaaagctttttatttcatgcttttaatggatttaaaataaatagcattgtgaaatcacattcttggtgtttattgggatggtggagtgctctaatgaatcctgttacataaaacgatgtagattgcagggaacacgagagagtaacatgtttttagtcatcattttcacccctcatttatttgagaaaatggatagtaattagatgtcgtggagcattttcttttcttacagaaaatttcttgattggatttatcttgctcactgtttcacatttagtttgcacagcaaatagtccttggtttgaaatggtttgattacgatgatttatccgttatttcttcctgcccaattctaccatttaaacactatcctctcctttagtgaaaaataaagatgtcagaatgaacttagtaggataaagtcatttttttaatccaattgtcaaccctaatgtttccactctactcttggttttgccctttgtgtgtgtgtgtgtgtgtgtgtgtgtgtgtgtgtgtggacttggagctttattttctagtaggaattcagaatgctgaaaatattttaaggtttgcattttgcctttttaagaaaaaatggtaaaattgtattatcaactagaaaagcggaagcttcctagacttaaaatttttcaacttcagtttagccctaattaaatagatcctgtcttccactgatgccgtatatagtgttctccttccagtataaggtaatctggcagtttaccttagagtttaggaaactaccttggaatagagtcctcttttaaaataatggtgcagttcttccaaggtgacaattactgttagctttttcctgggtctgtaataaatgtagcattaaatttttttttttttgcatttttaagagtagcataagaatgtcatcctttgagcttgattttaaatgaagatatcagcagataatatactcgaagaatatttatagtggctccaaatgagacagtctaagtcattcaatagtaatagctaccaattggttttgtgtttcctattcacctgtagcagtttgttagacattgtgatatatatctggagttcaaaccatcccaacggttacatagaagggcatgaagaagaagagatagcaaaataatgatcagagaggtaggagagaaaccaggagggtattgtaacaaaaagctgaggaagaatttcacaaatcatggagatgtaaaagaattgtaggttggcactggatgcagccgtagctggagaccttaaatctgtcttagctacagtctgcacaactatgtttattagttttgtcagcaattatcaacccaagtgaatggttacataagggagaataagggtgggactttttagtttcagactaaatggatggctaagaaaagtaaggcatagcctagcaaaaaatcctgaatcctaagattaaaggaaaacccatatgtgattcctaagagaaaaaaacaagaaaaagagaaaataattagattggcattggacttgtattaaactggaagctagaagatggtagaatagcatctccagacaataagtaaaaccaatgaagaagactgcagccatatgttctatatccagttctatacctatcaaagaaatgaaagatacttgaggataagaataaaacagtataccacctacctaaagaaaatacttgagagaagagaaaatagcaaaggtatgagaggagagaggtcaagatggaaaaaagaaagaagcaggtgagcgaggaaacatagatgcagttaaatctatgaggggagactcagaatgtataatctaaattcaaaataaggcttcttgaaacagaaaatgcataacacaagataattttagtaagattgcagaacaaaacatttttcaaagtcttatcttgttgatgtgggtgaggaatagataaacagagcattttcgtaaaagaaagactcttttaaatttccatcttatatgactaagcattaaacggataaagaagaacattttaagtaataagtggcacatagttataaggaagatgatagttataaacctaaatgcaccagacaacatagcaactaaaatatgtataaaacttatcagaaatgcaacaagaacttgaagtggaaaaggttaatatacgtgtctgaaggggataaactagtagaaaaaatgatgtaagggcagaggaaccgagtcaataaacttgaatataaagacacattcattcctcaaagaataaattttttgtatgtttatggaacattaacgaaaatcaaacatgtgattggccacaagaaaaaccttaccaaatttggggaaaatagattttctagaccatattctctggtcataagccaataaaattatgaatatctaataatatataactaaaactttaccttaaatttgagaagcacattatttgatattactaagattaaagaagagataaaaaattaaaactacaaactatctagaaagcaatgaaaaaatactcttctttcccaaactctgctacacagtgtaacccatactcagaggaaaaattgtaaccttaaattctttcttaaccaaagaagaaatatggaaaacaaaagaactaggtaatcatcttaagaaattcaaacaacaacaaaatattaattcaaagaaaatagggaagaggaattaagataaaagcttaaatcatggacctagaatataaaaaaaaaaaaagtacacacaaatttctaggctaacctttgtgcaaactcaatcattaggtgtgttaggggatcagtatgtatggaaatggaggtggcatataaattccctcaagtgattttggccctcatcatttctcctcattccagttatttacctacctcatgtttttgtctggaatctaagttacactgcgtggagagccacatgtgccgggttctgttatagcgtaattataaggccagaggggttttgtagtcatgctacctctagttgaaattcctactctgatgaaaatttccctggaaggagatttgtgaatatttggaatgctaaattactgagaaaaatctcatttaaaaaatgacaaggcagatcttaaaacataactagattatagttttatgaattagtgggaattagtaacaggtacatataaataccttgtatttgttttttaaattctcctttattcatcataccactcgagaagactgtcattgtcaatagcacttcttatcctgggaggcttaataaagtaagacttgttgcaatcccaaagtaacaattttgtcgtttaatattataaatgtggataatctttatattaccactggtatttacatcatattgtagagggaaaacctttgcctcacagcattgtcacatgaaggattatttttgactcaatttgaattgatggcaatagtacatttgaactgcttggtttttggaggggataaatgaaagggaggggaagtatggaggactggcattgtttttgtgaaaatttgtaaaagcagactgataagaaaacagacaatatctttctttaggcttttactactaattagaaggtgatgtggtgtgtgtgttcgggggtacacgtgtgtgttttacagaatgcatgtttatcttgtttttgataaaatatgggaaggaggaagggaggccttaaactctagaaaatatctaacagttggtagcatatgcatttacctatttttcagtttttgataacaagctaagctttcacctgattattgattttcctcttttctttcagcagaagagctggagtaattattttattttactattcatttttcttttgataatattagtctaaacagaaagtaacaggaacatgtaatatcttcagagcaaagaacacaatggcattgtttttatcctcggtataattctgttgacagttacctgtaaggttgtgcttttaaccatttaatcctgaaaccaaatcacactattggtccaagtctcatttctgttcattataaaatgtgtacgatagatatttatttctgcctttggccttacttagctatttacctcaattattgtatatcagttttttaaaaaaactgatttttaaaaaaatgccttgggtagatgtattttctcattctcagcaaatttttcaaacaacataatgttctgtaacatttataaggttgtttttactcaccgtttgtttcatttttttcattcacttacttggatttcctaaaaactatttttttagtttttgcttttaaaaaattaagttgaaatctgatcgtgatttttgcctttattttctttgtgtccatctataggatgaatacaagccagaaaaggccttgtctgaagaggacttgaaaaacgctgtgagtgtgcaccacgcattggcatccaaggccacggactatgagaagaaaccaaacgtgtttaaacttaaaactgccgactggagggtcttgctttttcaaactcagtatgttttgttggtttttatttgattttgtgttttagttcacttagcactactttattgcaaggaacaaaatcaagctctgcaggggaaattttttgagttggaatcaaagtcatcaactgcttacattagagaaataactgcctaagaagattagagtaaaaaaaaatagaaacccaggatttacatttttacctgttacaaagtagccctttgacttttagtcagccacttaccatctctagaattcagtatcctcatcaataaaatatgagggttttagtagacaagttttatcgcaaaatgagtaaaacagacctagataacactgtttctctagctctttctcctagcacatagtttaacctctgaacctcagctcgtcactagtgtgggggataacgtttatcttacagagttctagtgagaagtcagtgagataagtgtgtataatacctcacacagtgcctggcacataggaactgttcaataaatgtaaatgtttatttttttgtttcccttctgagctctagtagtccatgattatactagaaggaaaagatgtcattctactgtgagcaaggaaatgggatgaattgccagttttagggggaggttataaggaaacaagttgcccggggtttttgagtgtaggaatgggatggttaacatcacacagggacccatagctggatgtataattacagctattgggcataaagaaactttcaaattattctgttccctgattttttcaatcaaaaataccagatgtaataactaaggagatctaattactttggacagaattgatgcaaaaaacagtccattgaaataataatggagccagagagatcagcctagagagggtgccgtgaggagctgacatttagagtggtctcaggtttgtttgtgtggtttctctcagagtaattgatgaaggaaatgactttggctgactttttttttactttttgtttattgattatgtgtatggtagataatctgtcctgattcatgatcatttctaccattcatttatgagtttgcaaatatttattaagtgctgtgaatcttgggctttctggatataatgacacataaattaaaaatatgatcacatcagatgattttcacctcctctcaggtgggttttctaaatagtcttattgaggtatgctttacgtaccataaaatatcaccagtttgaaatgtacatttcagtgatttttttagcatatttacagaatggctcagccatcaccacaatctagttttgaatcatttccatcactccaaagagatccccgtgcgcattttgtagtcactgccattctcacctccagccccaggcacccactgatctactttctgcctctgcagtattgccctttctggacacttcatataaacagactaatatatgatgtggtcttttgtgtctggcttcttttatttaacataaagctttggaagtttatctgtattgtagtgtgtgtcagtactttattgctaaatactgttcagttgtgtgcatttactgcattttgtttatccatttactggacaatttggattgtttcccttttttgactcaggaatgatgatgctataaacactaacatacaaatctttgtgtatctgtatgttttcttttgagatggagtctcactttgccaccctagcctggagtgcggtggcgtgatctctgctcactgcaacctccgcctcccaggtacaagtgattctcctgcctcagcctcccaagtagctgggactacaagtgtgcaccaccatgcccagctaatttctgtatttttagtacagatggggtttcaccatgttggccaggctggtcttgaactcctgacctcacgtgatctgcccacctcggcttcccaaagtgctgggattacaggcatgagccaccacgtctggcatatctatatgtttttatttctcttggatagttacttaggagtagaattgctgggacgtatgatacatgcacagttaactttcgaagaacctgtcagctgttttccaaagtagataaatccttttaccttccctctaccaatgcattcctcagttagattttaaaattaaacagtacaattagaagagatgagtaaattttataatttatttttggcctagcctcgtatcaaacagaaagtaggggtttaatcaatatttattgtcaagtgtttctcttttttcccttctgtttcctagggagagaatcacagtctggcactgtgatgatcatagcttctttggtgatcgtcgaatgacaatgttcatctctaatgaagttttgtcagggattagttgtaccaggaggagtaaatgattttcacatgccattgcaaatcagtaacgtgaaataggcaaagtgtgatgctacttagacatggcaatatcctgatataaacatatctatttctcataggagcccagaggaaatgcaagggtggataaacaaaatcaattgtgtggcagctgtattttctgcaccaccatttccagcagcaatcggctctcagaagaagtttagccgcccacttctgcctgccactacaacaaaactgtctcaggtaatcatcttgatagtgctttgaccttgggaaaaagtactttgtaaaataatgtgataaatatttgtctttggatagtagtccatgttttgggggcaggtgtgagaccttgccctgtgagagcgtatcatataaatgaggcagatatgcagtacactgggttttacacttcatgtaggaagctgacataattgagtctcagttagtaggacacgtactttgattcagtttctaaggtttatattagttcattatgagcaatacttgatgttttgtttgttttaactgccagctcataatctggcttggtaacaagcttttcttgcattcatttattagctcatttttattgagcatttaccatattccaggatgtgtttagtgctagaaatacaaaaatattttcaggaatccacggttcatattacaatgggaaatggcctgccctacccctcagagcagagctgaatggaacatttggattttccaagctaatgaagataaagtataccagaactctgctccaagtgtatttacataagcctccttctgtggtcagattaatcttactaaaagccatattttatcatgtcctttttcacttaaaactcttctaaggacactacctaccagctaggtttgctcattttaaacctgtctgtagtacccccttgccattgactagttaaagattttggaagctactttgatgtctttgtgaatttcttattacatagagacagttttatcttactatgatcgaccaagtgttggtattaactagctccctatacatctttgatatcataagatgtgtcccatggcaagagagggagcaattatcaatgatagattaatttaataaatatgtattgtgtgcctgttgtacatcagagactatttttggccctggagatagaaaggcagatgaaggccagatcctctgctgaaggtgtggcaaatataaataaggaagtcattgtaaaatgatttgatagaagtacaggaaggataagtccagagagctgtggaggttcaaggaagggacattatctagcctggccttggaggtgaaggaggaaatgtggtacctaatgtgcagcttaaaggatgagaggcagttaggtgaggtgtgggacgagataggaaaaagagccatcagaggaacgaaggcctagagaagagagcgctggatgcaggaaccacacacaagttattaactgtgacatgagcacagtgttgagaaaaagcaagaaatgtacctctgcagaggtcagcaaaggccaaatcatgaaaggccttgtttgtcgtgtgtaggattttggatgctgctgtggttcccagcatccttaaaataatagctttaagactgggcacagtggctcatgcctgtaatcccagcacttttggaagccgaggtgggcagatcacctgaggtcaggagtttgagaccagcctggccagcatggtaaaaccctgtctctagtaaaaaatacaaaaattagccaggcgcagtggtggatgactgtaatcccagctacttgggaggtggacacaggagaactggttgaacccaggaggctgaggttgcagtgagccgagatcatgccactgcattccagcctgggcgacagagcaaaactccatctcaataataataataataataataataataataatagttttaagcaggacagtaatgtgatcacatttttgctttaaaaattattctcattacaatatgagaaattgttagaagaagatactacttgcatttctctgatggccagtgatgatgagcattttttcatgtgttttttggctgcataaatgtcttcttttgagaagtgtctgttcatgtccttcgcccactttttgatggggttgtttgtttttttcttgtaaatttgtttgaattcattgtagattctggatattagccctttgtcagatgagtagtaggttgcgaaaattttctcccattttataggttgcctgttcactctgatggtagtttcttttgctgtgcagaagctctttagtttaattagatcccatttgtcaattttgtgttttgttgccattgcttttggtgttttagacatgaagtccttgcccatgcctatgtcctgaatggtaatgcctaggttttcttctagggtttctatggttttaggtctaacgtttaagtctttaatccatcttgaattgatttttgtataaggtgtaaggaagggatccagtttcagctttctacatatggctagccagttttcccagcaccatttattaaatagggaatccccattgcttgtttttgtcatgtttgtcaaagatcagatggttgtagataagcggcattatttctgagggctctgttctgttccattgatctatatctctgttttggtaccagtaccacggtgttttggttgctatagccttgtagtatagtttgaagtcaggtagtgtgatgcctccagcttcgttcttttggcttaggattgacttggcgatgcgggctcttttttggttccatatgaactttaaagtagttttttccaattctgtgaagaaagtcattggtagcttgatggggatggcattgaatctgtaaattaccttgggcagtatggccattttcacgatattgattcttcctaccacatattctcactcataggtgggaactgaacaatgagatcacatggacacaggaaggggaatgtcacactctggggactgttgtggggtcgggggagtggggagggatagcatcgggagatatacctaatgctagatgacgagttagtgggtgcagcgcaccagcatggcacatgtatacgtatgtaagtaacctgcacaatgtgcacatgtacccgaaaacttaaatggaatgttcttccatttgtttgtatcctcttttatttccttgagcagtggttggtagttctcctggaagaggtccttcacatcccttgtaagttggattcctaggtattttattctctttgaagcaattgtgaatgggagttcactcatgatttggctctctgtttgtctgttgttggtgtataagaatgcttgtgatttttctacattgagataccatctcacaccagttagaatggcaatcattaaaaagtcaggaaacaacaggtgctggagaggatgtggagaaataggaacacttttacactgttggtgggactgtaaactagttcaaccattgtggaagtcagtgtggcgattcctcagggatctagaactagaaataccatttgacccagccatcccattactgggtatatacccaaaggactataaatcatgctgctataaagacacatgcacacgtatgtttattgcggcattattcacaatagcaaagacttggaaccaacccaaatgtccaacaacgatagactggattaagaaaatgtggcacatatacaccatggaatactacgcagccataaaaaatgatgagttcatgtcctttgtagggacatggatgaaattggaaatcatcattctcagtaagctatcgcaagaacaaaaaaccaaacaccacatattctcactcataggtgggaactgaacagtgagatcacatggacacaggaaggggaatatcaccctctggggactgttgtggggtcgggggagtggggagggatagcatcgggagatatacctaatgctagatgacgagttagtgggtgcagcgcaccagcatggcacatgtatacgtatgtaactaacctgcacattgtgcacatgtacccgaaaacttaaagtataataaaaaaaaaaaagaagaagaaggtactactagaagcagaaaggcccattttaaaggaattttcagtaatccagaggagagataaccaaggtagctgcagaagaaatggatcgtagtgaaagtgcttgagagaccttgaaagtgtagaatggacacttctggtggctcatggaagtagaggaaacaggctgtcattgtggcttggacagctggggactgtggtgtctgacctgcttctggagtctcacctcactgtctcttgatttccccccttgcttcttagactcctttcttggatcattttcttctttctgtctccaattcctgcagtggccagagctcagaagcagactaaggcacttgataagcaattttccaaaaagttacttagatttaatacaaacagggagaatgttgtgccaagaaaggggggaaaaggttccatgaagatttagatttaaaaatgtgatatttagtggctgggaggtcactgggtatcttagcccattttgtgtttctataaagaatactagagcctgggtcatttagaaagaagagaggtttatttggctcacggttctgcaggctatacacgaagcatggcatcagcatctgcttctggtaagaatctcaggaagcatcaaatgatgatagaaggggaaagggaaacagatgtgtcacatggcaagagagagaggaagggaaagtgccaggctctttttaacaacccactttcacttgaactaataaagcaagaactacctcattatcataagcgtggcatcaagccattcatgagggatctacccccataacgcaaacacctcttaccaggtcccacctccaacattggggatcacattacaacatgagattcggaggggacaagcatccaaactatatcattggataaccttagcaagaacattttggtggagtcatgggaagacaaaccacattggccttctttgatgggggaatgaatggaaggtaataaggaagtggaggaggaaaatgtgctcaagtgttgccatagttataaaaacagaaagactagtagtaagaaggaagaatctgtggtttcaggaaagattcttctgtttttaattcataattatcattaacatatattgaatgcttacttgtaagcattactattactgtacagttcttgcaggacacaatggcattgaatttttaagggtaataagtacactacaactttaaaagaaaaggaatgctcttactgatgaccagaaggtatgttggcagacatctccatctatccaactaaaatatgaactcttaaagcaaatgcatttctctgctttaaatatgcatacttaacataagcagcataccacataaagagcatgtcgcataaaaggtaaatcacattacacgatataaggggagggaaaaaatcaagtaactggaagcaaaaaaaaaaaccttccaaaattgagttttgctctattaattttacggtggactttcccattgttctttttcagtagtttgggtctttctcacattcagttctataaaagatccaggggagaaggtgagttgaactaaagagggctgataataagcatgtcattcatggaaggtgaatgtaacttagagcaacatatgagtgtttccttgattttccctcactaaaatctacagttctgtttactttatactttaaaaaatgtactgctttcctatttagggactgtatactagtaagtgatatgtacgtgaaaatgaatgtgttcatctgtttgcgtgttttccccagaacaggcaagcacacacatttatcatggtaggcactcttatttctaacagatgacttacactggaaccaaaaatagaatgcataatttttaaaaatgttttccttcattttggacataaatccacagagatgcaaaaacatgcatatgtagtataatcacaattagggattgaagattttaaataagaaggtaataaccaaaaagaaatatcctgcagtatcatgtaagacaaggtaaccgtatcatttcaggaatttaatttatttggaaagaaatgagatgatctccgccaccccactgaattgcatcacccagcatttgctttgtgggcctcagctttccatctagaaaaatgagatggttctagaatgtttttaaggaattttttttttttttttttttttgagacagagtctggctctgttgcccaggctggagtgcagtggcttgatctcggctcactgcaatccccacctcccgggttcatgccattctcctgcctcagcctctcgagtagctgggattacaggcgcccgccaccatacccagctaatttttcgtatttttagtagagataaggtttcaccgtgttagcaatgatggtctcgaactcctggcctcaagcagtctgcccacctcggcctcccaaagtgctggaattacaggcgtgagccaccctgcccagcaaggatttttctatccaaagctctgtattatttctttgccgagtcataaggtttgtttctaaagataagatttttagctttgagaaacacatatgtaaaattaagcatgtatttggagtagcacctgaggctcttggggatatctatactggggtcatagtgtgcctccagcaaatcctggaagatgtctggctgcccctaggattcctccagtacctcaaagactagctctcatcctttaacccaggcatattcgagcgcagcagcattaacattttggtgtggataattctttgtcgtgagggcctctgtgaattgtaggatgtttagcgatatccccagcttctacccactagatgccaatagggaccccccagttctaacaaccaaaaatgtctccagacattgccaaatatcttctggggtcaaaatccaacccactcctattgagaaccactgctttagccagtggatgtgaagccgtgagaccagctatctttttttccccatactcccacaacctggctctgactcccctaaatgccacaattttttggataattttactttacaaaatacaggtataaaaatgtgagtgccttgctggaaacattgataaagaaagataaacagtgtggggaaaaattagacgttcaattaaaagattgtttggtgctttttcaagacacagtgtttgtcaccctgtcatttgtgggctttgctttaatttattcttgtcttttatgcaaaacacattagccttaatcattaaaattgattattgccagtgcagcgtggtactttctgaacaactctgctgtgtaggaggagtcgccttctttgtttttcatgacagtgctgccagagcacatttttcttctattgggggtggaaagacttgtttgaaaatacaagttttgcttctccttctggtgtagctctccaaacacagaaatgcatggccggccctgttcacagtctgctcacaacctccctttctgcccaccagagaagtcttttcaaacttcagtgtgcacaacagctatgtcgggacttgcagaaaatgcacatttcccagccccaccaggtcgttcaggtccaggctgggctcagggacacatgtgtgtttcttttccactccaggccggcaggtggctccagatcccacttaaaccctacactgtaggaacctgtgcctaccctaggtctttccttgcttctttagagaatggtgccccaggacatcttcatttcctgatatctaggtcttttttcttagaattccaaccattgtcttataaaagtttgaatccatgggtactaaatacttttttggtcagacttaagatggatactgatcagaagcaaagcagtcctatgcttgattctcacgctgaagtaacccccacccctccttttgtcctgtggtatgaccacaaggcagtggtgctcagagccaggtgagtggagctgaccttacgggcagtgggatttcaggggaggaggtcattcttgtagttgcttccttcactgcgcccccacccacccatttccacagtttctgtcataaagtcctgtcacttctaccctctaaatatcttttttttttttttttgagacaaggtctcactctatcacccaggctggagtgcagtggtgccatcttggctcactgcaacctccacctcccaggttcaagtgattgtcctgcctcagcctcccaagtagctgggattacaggtgtgcaccaccatgcccagctaatgtgtttatttttagtagagacggggtttcaccatgttggccaggctggtcttgacctcctgacctcaggtgatccgcccgcatcggcctcccaaagtgttgggattacaggcgtgagccaccgtgcctggccaatgtctttcatattctacacctactgcttcagatttttgtcatattctacctagatcactggtctactcacttttttgactattcaccttatcccaatactaaatatttcagcagatatcttttaatatatgatgcttttttaaagaaaataaactacattttccactgtcaatcccagtaataaatattagtaaaccttaacattttgtagtgcttagattaaaaaaaaaaaagaagaagaaaactttaaattttttcccagtgcctaaggagctattaaaatttttgaaaactcataaacgagttcagcactgttagacatgcaggggtgtttttatggtatgtgaattgtatctcaatactgattttaaaactctttgcagtgggtcatcttgcctgggctacacacaccccactttggaataatctgacccagatgatttctgtaaccacttgtgatctctcttccagtaatcttatgtccttctgatccaccctttacagttctgactaaaatatgattctaattatgtcacttacccttaactgattcattttttcacattcaaactctttgatgtggccttaattgttacccatacttttcctgaatggatagatttttaaaaattcatttcttcgaggtctgtatttaatatatattaagtacccaataaaacaagtaattaaatcatgtggaagctattttgcttatactcattaaatactgtgtttaaggtctaaagctgtcttaaacatgaaattatgaaacaatcttttggattgagcctccctcaaactgactcaaagacaggtgttctgtattctaaattctgtaccacttcgttttgaacagtttccagtgtttagcaatttgacttctaagttgcactgcggatccctagatacatgattaccctgaaaatcatctgtctcctttaagacagcacaaaggaaacagtctaagccctcccctctgtatcttcacttaaaaaaaaaaatctatttgttcagctactgtttaccgaagatcctgtatagcaggtactatgttaggttttgtgggcattataaaaacaggtgagacaattgccttggccctcaacttctgagagcttaaggtatttgttcatgttaggcaggtaatgtctataaaccaaaagctgccacatactatctctctgctcaacactttactggatactggaggatttaagggaaggaaaaaagtgaccttttttgcctttttaagagcttgtaatcggtaaaggagataaaactcacacaaaggtcagggtatattttgtgctaagcatatgacgtagacatttaagtgctgccgtaatgcagaagaggaagaagtggtgtgatctagagtaacataggtttggttttgttttgtttttgttttttctttttctttttctttttctttttctttttctttttctttatctagacagagtctcactctgtcgcccaggctggagtgcagtggcatgatctcggctccctgcaacctccgcctcccaggttcaagcaattcccctgcctcggcctccagtgcaattggaattaaaggcgcatgccaccacacccggctaatttttgtatttttagtagaaacggggtttcaccatgttggccaggctggtctcgaactcttgaccttcagtgatccgcccatctcagcctcttaaagtgctaggattacaggtgtgagtcaccaggcccagcctgtaacagaggttttgagtggaatttggagcaaggtgagtaaccctgagtccagcctgcacgtttgagagctatagcagaggagacccggcagcagtggagtttaccaagagctctgaaagctgagttcaggattgatctgtcaagtaagacaatgtgctgaagctatgttgttgacagccctttggatttcagaaggctgttccaaggtgacttcatgatagaagttgggagaatgtggcttctgccactctgtccttttgtctgaactggagcaattacttgaactctctggatctccatcttctctaagacaaagagggtagaaaggacagtggccaggttctcttccaccttagaacatctaggattctgtatcccacagcttggaggaaaagactggtggcagccactgtggctgttccctcttcttattcccagcacccagcacagtgcctgctgtatgggcgctcggtgaggttcgcggatggataaatgtgttctctgtttcccgattctctctgccttctctctcattcttcctcctttccctcttggagccatctgcatttctattttattgtttcctttaagttttcacagcttctctctcatccttctctccatgataagtactatgtaaatcttatacttggtataaaaagataaaaagctaatttctggcccttggtcctgggctttgcaccgggggagaaggactgtaactccaagtcagcccttgactcacactgcaagatcttcaacagccaagttgcctgttcccattgcctgatcagttaagcaatactgtcttcatagagatgacattagagcttaatattttaaaggaaattctgaaattgttctcaaaacctaagtactatataaataggaaaaaaattaaatatttttttaacaattttaattgaccatataataattatatgtatttccaggtataattgtgatgttttgctatatcaattttttatggttagaacacttaaattctattctttgagcaagtttgaaatacacagtgcattattatgaactctagccatcatgatacacaacagaatttattcctcttgtctgatatttttcatcctttgaccagcatgtccccagtcccttgcccccagcctctggtaaccaccattctccttatttctatgagttcaattgttttagattccatatatgagatcatccaatatctgtctttctgtgccggtcttacttcagttagcaaaatgtcctccaggtttgtccatgttgtcgcaaatgacagaatttcctcttttttaagggtgaataaataatactccattgtgtatatataccacattttccttatccatttttcaaaggacacttagatctcttctagatcttagctattgtgaataatgctgcagccaagagctgttccctcttcttgaagaagatacggcatggtctcaccatgagaatgccacatctttttgagatactgatttcatttctttggctacatactcagaagtgggattgctagattatttggtaattccatttttagttttttgaggagccttcttacagttttccagattttcctgacagcatttgtgaggataaatgttgtatcctcacatgacagaagacgggggcaaaaaagggtctaacctatatcactccagcacttctataagacacttaccgcttcatgagggactcaatcactttccaaaaggcaccatctcttaatactacacaatgaggattaagtttcgatatgaagtttgaaggggatacaatgaaaccatagcaaagtcctttgcccattttttaattgctttgttttcttgctattgtattgttttgagttccttatatactttggggattaacccctaatataagtaaatgaaatcctaagtgacttcgaaaacttgccttttagataaaatgttgttgtatatattatgaaaggtcttactgatttaaatctattgacatataaccacaacaacttttcttgtatctagtattttcaatttcattttttaaaaattatcacttcctaacttaaaacaattttatgagtttgtggtattttctatctccatgccttttctttgtcaaatgtaatatttttctgccatctctgaaatctattttgctagtattgtcttctaaaaacagtatgtatgcatccctaaagaactgtaaaagcaaagacaaaaggtgggggaataaaaaagcaaattcctactttgtctttcttcatcgtgtctattacaaatgtagttgtcctgagtctgagaatgtgacatctccatggctgcagcctctctcccgttgttttttaccattgttttttgttgttgttgctgttgttgtttttttgtttgtgtgtgtgtgtgtgtgtgtgtgtgtgtgtgtgtaaaatgtgtatctttcttatcatgggattctagcactggaataatttgcatggtcaagctgtgtccgtaagagccacttggcatttctatttcactgttcaaaatggacagatttaaggagatgtgattttaaaatgctttattttgagcttactttattgactcctgccttatgaagccagtgaaatagtagtgaagcatttctcattgaacatcagcacttcctcggttagttcctttgtaaaaatatagcctaaatgactagccctttatgctgctgtagaaacagatttacgtaccatagcttggtaacagtgaacaaacccgagcaagccctggtattgggaggaaagtgaaaaacataagatgttgcacatattgtcattctagcctgtattcctcattaaaataagtagaaattgggatttgttcaacagaaaaagagacatttgaatattcaagattggaaagcctaaatctaaagcttttagaagaagcaaacatctgaaagcatatttgcatagatccaaagtaaaaaaaaatagaagtttgtaaattcttttaccaaattacctaaaatcctattttttcttaaataaactggattctatcattggattctaattattggattctaattatttcctaaccacaaatagaaagagtttgatttcttaacatatatattataaataactatactgatacaaatctattttttaaaaggcaaacaacccaatagaaaaatgggtccagtaatccacagaagaggaaacccagtaaacctatgaacaaaatctcatcctcattcatattcagggaaatataaattcaaatcacagtggcttatcatttcttacctatgaaattagcaacaatttacaagtataataacatcacattttgacaagaatgtaaaacaaagagaactttcagacctgctgtggaaatgtaaacagataaaaacactttagaaaacagtcatcttaaagatgcgcatattctaaaacccagaaatgccaacactttgtgacacactatagaaaaactcttgctcagattccctaggagacatgtgtaagaatgtctgttgcaacatcatttataacagggaaaaaaaatcccacaacaggaaacctgaaaacaagctaaatatccttaaacaaaattgtaatgtgtcctgcagtggggtactatgcaatgtttaaaagacaggaactagagcatacatgtagataaatcttaaaaacatgttgagtgaaaaaaaaattacaaaagaaagcctttaattagtttttatatcaagtataaaacctagagaatacacttctggttttgttttgttttgtttttttgagatggagtcttgctctgtcacccagactggagtgcagtggcgcaacctcgactcactgcagcctccatctcccaggttcaagtgattctcctgcctcagcctcctgagtcactgggattacaggcacgtgctaccacgcctggctaatttttgtatttttagtagagacagggtttcaccatgttagtcaggctggtctcaaactcctgaccttgtgatccacctgcctcagcctcccaaagtgctgggattacaggcgtgaggcaccccacacccggctacacttctgtatttttatggttacatatctttatatatgaataacactgaaaaggaatgagatgagcacgtacatgtgtagggagtttccatttatttatattttatttcttaaattcctatgttagattcatgggtgtttttcatatatcattcaatatgactttttatatatttaaaactttttttagaaaagaaggaaaatacatcatgcttttattttttgaagtggtccagtcactaaatatcatttgtcaagaagtctattaggtaatttacatattgcaataaatacacaaaggaaaacaactttgaaagaaataaaaactattgatatagtttgtcttagctcaggctgccataacaaaacactatagattgggtggcttccatagcagacatctattttctcacagttctggagatgggaaatccaagatcaaggtgccagcagagttggtgtctggtgagggctctcccctagggctgtggatggccaccatggccttccattggtgcttgcacacagtgtctcctcttataagggcactaatcctattggatatatgccccactcttatgacctcatttaaccattattacttctttagggaccccattttcgagtatagctacactgaaggttaattttgagtggacacattcaatccataacatagttgatagtctccttgcctgaaagtaatagatgagtaagaacttgtaaataaaagctacctgaagcatttttgactttcagcattatcagtatacaaataataggtttggagatgtagacgcctttctaaaatctcaaaataggtttcttttctccttcgtccttttctgggacttcttggagtgtttcattttgttttgttatagttggcatttagaaatgaatcttgtcatttttagatcactccacgtgttcatgctacctttcttgttcatttttccattcgtgtcctctgctttttacttgtcattgttttcttctgttttgatggtttttgacttggattttgtttttgttgtttggcttttaagatgtacattattacaaaagtccgtaagatattatatgtgacgctcataatttctggacacgttttcttctaatttacaacaatattatatatttgtaatttactgtccatagttattcattttctgtttatgtaaaaaattattcccctcattctacaagatttttgtgttctacaattatgttggtgttatataaaatacatttatcacctaatttagtcagatctgtttcatttgcctttacccatttatcttattgtacctgtgaaatttggataatttgcatgtgaaactagaacagtaaggagtcatacattttcaagaatgcaagagaattccaagaatgtttttaaaatgctggcagaaggttcagtaacatatctttttgggtagcctattgctaaggtgatataaatggtacccttagaatggaaatcctttgatgtaggatcaaccatattgcattggtacacggtacctataataatgctactaaggcaataattgctaaataggtagatacattttaattgacgggttgctttgggccaatcaagttgaaggaactaagaactctgctgctttggtaagagaaaagcgagatagctgcatgttttagaatatcatctggtaagcttcagagaagaaatttttcttcgtagctctgcttctttcaaaaaggaaaaaaaatatgcacatagacaattacaattcattcattgtgatggatggaaaagctggcagcattgctgagtgggcatgaaatgggaaagccaaggtgtgcagcttccatgctagctgcttaactgttcagctggtgacatgcctgtcagggcatctcttaaggcctggtcccaactcaggggcatttacacctgataaagagctcggaagccatttggttttatgacaagggacctagttaaagaggttggccttgattgccatcccgggaaggaatatatgaaatatgtggacaggggcgtgagaaagctggaaggatgtggcagcagaggcacattgggctgttttagtgaattaaagtcattcagcacaggggattttttaaagtatgctgtgctttgttattgacttgttttttttttgaacgctaaatggcatcatgatttcctgcaggaggagcaactgaagtcacatgaaagtaagctgaagcagatcaccaccgagctggccgagcaccgctcatatccccccgacaagaaggtcaaagccaaggacgtcgatgagtacaaactgaaagaccactatctggagtttgaggtgtgttgcacccaaatgttagtaaatgctgatttctgagttttcttatgatctgtccatgaggcggtatctttctttgcagtgtcactgagagaggcgtgtcttgcccctggctctaatttgggagctcctggcaaggtcatggtggcccctcttgtttgtgattctgtttaagtgccaagcaaacatcaaagagtaacctgccagtttatacacttaaaagtaaatagcctgcctggttggaatagtgtgcgcccgctgtgaggggaagaaaaagaacagtagagggacacaccagggtggacagctgctttctgtatccctgtgtctcttccggcagaattggagtcaaaaaaagcacaagggaggaaatgagccacatagttgatgtgaggcatcagcttttccctgcacattcttgctgttcggcaacactatgcgtttttcttcttgtcacccactgcccttcagaagggggttgataaattaagttgtggcacatccatctatacagtgagtgtgcttattaaaaagaatggtgaggatccatatgctatggcatggaaaagtgtaaaatttaaacccaagttgaaaacagtatatttccaaatatttccatggctcagttttcttccaaattaatgtcagggttagagtcccttagcctctgccttcagacatttaaagtgtctttttatttttaaagtaggtagcatgcaatacaaaataaaaagaattaattatcgactaatttgacctgttgttttttgtttttgtttttttttctggtgggtgtgctgaatctgcctttagctgttctttttcattgtagctctggccccttttacttctcattgttcctctcctttgttttcatcttatctgatttcctcctcaggcttgaaatttaaaatcttctaagtgtccacatcctagcgatcagtgtctgtggcgtctcacacctgtcccttccttgtattgctttataactacttcctctgctgagccctggctttctcctctcactccgctctccttccgttcatcctaaatcctttggccggttgtttttctgaggttcaacccagatgacggcattcctctgcttgacagctgcctacagcttccccgattcccctcccccagttacctcctgaagaaagtctcatttctttcactggagaggatttggcgtctccacgtttccacaacgtccgtctttcccacactggcctccctacggtagtcacatttctgcctactctccccaaacacacgtttatacctttgttcacttactttcctctgcctaagatgctcttcccatcatcttcatttctgacagtcctgttcgtcttttgaggtacagcccaaattcctcctatgaaaaacctgatccagatatactagctgggattcatctgtttcagtacttggcacaatttttttaagctgaagttattttcatctgtctttgttacctgtagcggattccgtaatacctccccctacccaaaactatgagcctaagttcatttccaggccttgctatgtgtgcttgctgaattggatacaatttcatagaagccttaaaaagtctctgagttataatatttctgttatcaaatgtagcatttgattaaaaaaatgacacttccactacagttccatgtactagttttcttcatggtcaagcaaatccttgctctgggcggagaactctactaagagaactatttattttggtaaaggtaaacgtttcttagcaaaaaccgtagaagccttaccagcaaaatgcttgaaaaaataaaataaaaaataaaaataaaccaacaacaaaaaactaggcagctcatctttccccaggcttgttcattcttgggaaatgggagttctcaaaaagcaatcattattcttcacacttctgaagtggctttaagccataggcctgttttgtttcacacaagctaattaaatttcccagcacctcagtccctgcttccagcactcagcacctcgctggagcccttgatgccgaaggtggaagagcctgtccccaggaggtggggggtggctgcaaggccatggaaagcttgccattgctaggagccctccctacttttgagtcgacagcgctacctcttttctgaaaatgtaacccaccaagagccagcattttcaatccctgacatgaagttagaccaagttttgcagggattaagtcttgctttcatcaaatcgtcacctcagcgagcttgcagactgcgttccaggactcattaaaatcagacccatatgctaatatgtcaagcaggttgacttgtctgtcaagctccttcacctgtgtctatcagaaaggcgcgaggatagctgacttggtacagctaatatttatgtcatgaaagagggaaaatttcagctgtcatctaaaaggggttttgtataagtagtgctttttaagaagtgaacaattgtttttcagtaatttaaattaacattgaagtcatatatcatattgagtccactttgctattgttgcagccaccggaatttttctctcgtgagtgcttgcagagagtctttgcacagcatcctttgcttcataagcagcattccctgagcaggccgcttcatagcagatataagagttattgaccatttttcccagtttctggaacactgactaattgacgcacgtttgttgacaacatgcgtgaaattttattattgtatataaaagataacatcagaggaagtaattctctgagaaaccttagtattcattgttttaacaggaccagaagctcccatgaaaacaaacctggtgactgttctcacccaggtgagagcagacagcagtgtctgcagttcagtgggagcccacagatgggcagtgacaggaagaggagctttaatcaccagggaagatcataggcatgaatgggtgctctcacctcctcttatggtgggtcctcctcaacagggcctcccttggtttcaaagcaattcttaccattttcacaagtccttggtaaggaaaaatacttttattttggcagaatattaagctgttagtaataacaccaggagtgttactaattgtatgcattccagttgtttaaatcccaggttgctttgagtacaaacagtgcttcatggtgagccaaatttacctctctttctatgccttagaaactgtccaaactctgactgacagtaaataatcagaaattctggtaaatacagggtttaaaaaaaaatttacagagagcaaggaaacttccatcttagcctgttagaaaagaggttcacttttacttaaagcagcaaactttactcagaatgggctctcttcattgacttaactctaagcgaagggatgttactgaattggtaacctccaagctgtggtttggaatctaatcttacttctaaaagaggctttaagcatgacaagtctacattgagaaactcaccatcatttcccaatttcaagaaataaatatcagaaatagccacatttccttataaattaacttttttctattttattcagttcccattttacttaaaaatatttaattgatccctgtgcttctagtatattgggaaacagatcaagttctggggcagatcgatgttttgtgtcaatgtaaaagtttacaaggctccaaacaaagcacagttggttgagctgttctggaaaacacctgggccccttaagacacagcaccattagagaaattcccttgacagcaatgcagttggccctaatgttttggttttatgtttcttcagctttaaaaacaacagcaactggaaggagatgacgctttttatttcaagatatttttcctgcaacatttaagatgttacagatgcaacgtttaagatgattacagatgttaacatactccttaaattaagctggacctgagtagggagagggaaaagatacaccagcccaagcctattaaatccatgactgggctacaagagatttactacaggggaattgctgaaggtcaggttaatagctggctttcaggtcattgtaaagcctgttagaaaaccagccgacgcaatgccaatgaattgtatgttgccagcccacctaatgtcaacgtgttttctttggccaacataatactgtatttgttttcattgtaatttaaatgcgtttaggaaagacaggtcttgtccttctcaccattgcctgttattaatatatcacatctgataactttctacagtaagtgtcattgctctggtccctgaaggcttttgagtttgcaaaccctgtactagaggctgcagccagttttatatgtattaagtattagttagatctttgaacatgggcttggaattaatagtcccttcatgcttggaaggaagatacttctcggtatatgtgttttcaggttccaatccagcaggaaaaaagagaatgtccacttccctcatgactgaaaccaaagacttagaataaaggtcacttgacttaatgggcttgaattcagctgaatacccactcctgaattgcgacccagagtagcatatgcttatggcttaaggcagttagagcccacaccaaccacatggctaggaaattcaattttagaaacaacaaatgtccactataacaaaacttataaatttcttgggacagaatattttcttaaaaatctaggacattcttgaagcatgatgcacctttttctgaatttctaattcttggtgacatttaaaacagcatgattccttccaaaattgatatatgtgcaaaaaaagaatacattctattcaaagtcattagggaagcccataaccattcatatctggaagcacagataatataaatttcagatagtaaacctttcattttactgttgagtatcttgttgcatagtcagtagcgttgggtagtttgatatatttcctttggagaacactttctggttgtgatcctagccttattcctcagatggtttatttttatttgtcaacattggggaagcaattttcatagtaggggccattatctaggtcacttttgctttcacaggagcagtgcagaggcatatctcaatacagtgccaactgtcacaaggcaaacccaccctctgaaacaaaattttctagcaattaagctgcaagtggtctggatcataaaagtgcaaagatagccattatttcccttggtcttcctagcgaaagcaagggagaaattctgttaaactagttaaagaagattagtagcaaaagtctcaatcttagtaagtcagtctagcgtggaatcaaatgctatctcctttacagaagacatgacagaggtgattatacatctggatctggaactgagatagtgtaggttaatagaattattgaggaaattgaagacttttctttttttcgtgggatactaagtacagatggttcccgacttaagatggtttgacttacaatttttcaacttgatgatagtgcaaaagtggtatgctttcagtacagtttttagtatattacgtgaggtattcaatattttattataaaacaggctttggggttagataattttgcccacctaagttaatattaaatgttctgagcacatttaaggtaggctgggctaagttaatgatgttcagtaggttaggtggtgtaaatatatttttgacttacgatattttcaacttagaatgggtttatctgggatataaccctattgcaagtcaaagagattctgtattacaattatgagtcaaaagctagagatgtaagatcaacagtttataccctgagtccagttaataatacagacatgatccttgccttgtcatttggaattgcattttgtattacataatgaaagaggactaagagctctgaattttaatctttaaatgataacagctgcttttgaagagaagcggagcctagcaacaggattctttgagccacatttttagtagatgattgcaaagaattagggccattcctgagaaggaagaataagcagccaatcatgtgatttgaaatgactccctgtccttaaatccctccttcatcaatcatttactgaaatgcctgctctgataagggtcactctattgggtaaaggtattatcttcaggaaaaggacaagaaagctgagagacaaaaatcataaaattagaaaaaggactagattgggaatccattttagtcttgtaattggtgtatttggcatgaccttatcctttctgaacctcagtttcctcgtcatagaaatgagatgggattgggtgaattagctgataagatcccttccaactctgtatttttaggagaatgacacattaacagcaatttgttttagattatgtcaccttcacaaagatttctatgagtgttaaacataaaacaaaaatatttcagttcaggaatgtcaggtgatatagatcagtgccttccattagaaataaatgtaaaccacctaggtgtgaatttaaattttctagcagctacatttaaaaattgaaagaaacaggtaaatagggtgacatcagcaagatggcagaatgggagctttctgttgtcgtctccctgcagaagcattgatttagacgtataccacagacaagagtacatttgtgggaatccatgagtccagtggagaagttttagcacaccattagattataaaatctgagaatagggccaggcgtggtggctcatgcctggtaatcccagcactttgggaggccgaggtgagtggatcacctgaggtcgggagttcaagaccagcctggccaacatggtgaaacccgtctcaattaaaaatacaaagaaaccccatctctgttaaaaatacaaaattagccaggtgttgtggcacatgcctgtaatcccagctacttgggaggctgaggcaggagaatcacttgaacccgggaggcagaggttgcagtgagccgagatcatgccattgcactctagcctgggcaataagagtgaaactctgtctcaaaaaaaaaaaaaaaaaaaaactgagaatagacagaataatgagtataagaagaacagtttcactttatctatgtcacccctacctcaaggcagaaaggtcactgccaagagagccccctgcaaccatgacctgtgatttcttccactggggaaagtgggagtgtaatgagtgagtgtctggctccctgagacgtgtaggatgctgcctaagaggctaaactgtttgacatcccactcagaatattaaggcaaccagcacagctgagtggttgagaaagattgaaagcagggaagagaggccatggaggcttctaactactctgtagacctccatcagaaagttctccccaagctgcatgggatgcctcacctacagatcctttcccccaggtggtccacaggcactccaaatgctccatgcacctcacactcccatccccaccccaagccagctcccaatgcatgcactgcagatagcaagtgcaaactacctgtcatacagtcactgagctcaattcggtgggattcagagagggcacacaaatttgagcattagaggacactggccaagggcacgcaaatgggaggctctcagcactcagccttgcaggatcaagagaacacgtacagtgtaagaattacccactaattgaaatgagaagtatagagtagatatgtccatagaaaaggtctgagagagcctcaaaatccctagcttggctgtttggagaaagtattcctcacccaaagacagtaaagactgaagataactgcttcttctaatgcaaaaacagcagtgcaagacgttaagtaacacaatcctgtaaaaatcaaaaaataataataataatattctagtaaccaatttcaaagaaatggacatctatgagttgcctgaaaaagaattcagaataattattttaagaaaactcagtaggccacagaatacaaagataagaatacaagagttcattgattcctcaatgaaatcagggaaacaatacaagaacaaaagttcaattaagagaaattatttaacaacccaaacaaattctggagctgaagcatatactgaatgacattttaaaaatgcaatagaaagtgtcaacagcagactttcttatgcagaagaaagaagctgagaacttgaaaacatgtcagttaaaaatacctaatcagatgggggaaaaaaggaaaaagaatgaaaaggaagggagaaagaaatctacaggattcatggaacaccatcaacagagccaattgctgcatcatagactgtaataagggcaagagagggaacatggcagaaagcttatttaaagaatacttatttaaagactgaatacttcccaaatctagagaaagatatgaatatccaggtacatgaatctcaaagacctccaatcaggttccacccaaagaggaattcaccaagacatattataatcaaactgtcaaaaattaaacatagagaatcttgaaagcaggaaagaaagggagttgagaagtgatgtctgcaagatggcttacacatacctgccacttatgcccctcacaaaaaacaactgaaactcaattagagtgtcagagggaaagcattaaagtgtagcaagagagtagtgagattccctgtagtgttcagaagcccaggaaggcagcatagtgagggtgatggggcaccctgcctctgccagctcatgttccctgctgagattagcttggagtcaagagggactacccccttgaggggaaaaggtaagcaaaagatccccaccagcttccattgccactgaagagacctgcagttcttactacaagagtataccacagccgcagcaagccctgagcctagtttggggagctgcctgtagttcacacagctacattgcttcagattaggagcacaagttgtgcatccctcactttaccctctttatgtaagctaccatgatatggcaccaccttgaaaccagatccactgctagagtgtgtcctgctctgagggttggtagcctctgtgtgccaccaatcttgggtctccaccgtcattccaccaggcttacatgggtgggtgcccagtgctagggcccaggaacaactgtggactcagatcctgcacacgagacaaattaatcccaggctggctgaattaatgcaagctcctgcccctgtctagagaaacagcccagatgacccaccaaaggcatacctgctcttgagccagcagaaccaccatgttctctcacctccagctggaggtacaagccagcaaatatgtccctggcattcttatccccgaaccatggagcagttatagcctgtgcaacttatatgtggaatctaaaaaactcaaacacaaagaagcagagggtagaatggtggtcatcaggggttgaggtgggggttggagggaaataagtagatgttgatcaaaaggtacaaatgtacagtcataagatgcataagttctggagacctaatgtacaacatggtgattgtatttaataataatgtattatgtacttcaaatttcctgaggataatagatcttaaatattctcaacataatgaataaatagatgaaacaggtgaaattaattgtagtgagattttaaaatttttacattatatgtccaaaatattttacattcttttttccatattaaatcatcaaaacctagtgtttgttttacacctgcagcatagctcaatccagtctagccccatttggcatgtctcatagtcacacataacttatggctcactgactccttgggttggaaggcgctttaccaagacaagctcaaaattggacatggactggtaagatgactacttatgatacttcccatttaaaggatcacttaaactggaaattcagaaagtttaaaattacttcaaggctgggcacggtggctcacgcctgtaatcccagcactttgggaggctgagacaggtgggtcatctcaggtcaagagttcgagaccagcatggcgaacatggcaaaataccttctctactaaaaatacaaaatattaggcgggcatggtggcgggcacctgtaatcccatctacttgctgaggcaggagaattgcgtgaacctgggaggtggaggttgcagtgagccaagatcgcaccattgcactatagcctgggcgacagagtgagactccatctcaaaaataaatgaataaatagactacttcaggtccaaaaggaataaataaatgtaggtgatgaaatgtcttaggagatcactggggaaggtagtttagatcatagttccttcagctgctcctcaaatcacactttaaggatttcctggaagaactgaccctgtcccattaagactggcattagcccttttggagctgtgagtgtgacacacaagctgacatggagaactctgggaatgtgcttctgagggatacccggtatgacttcggggaattccagtacaatcagaaggaaaagcaaagtgtaaaccaaaagattaaccacgtgccctatattaaaatgttgccataacaagctaccttttttgttttagaagatgtaaattacatagggaaaaacttaatgagtgacaaacttttatccttaggcaaaatttagtctcttacccagatagcagtacctctttagcccagattacttatcttgggtaagtggaagcttaaccttctatccttgtgtttcagaggctaatttttttttttccattttgttgaacaacaaactcggtaatcccattaatcaaatcagggtgtgttttcttttttaattttatactcagctatagtcaaaaccatcacaaggccaagctgggtgggacctttggaaacagccagagccagaggccttgtgggtggcagatcttcgtaaggttgctctgtttgtggtttggaaccggacaatttatttcttgagttttccacctagaaaataaaatgtgtggtattttctaagtaagctttgtagacttacagaatgttcattttagtttcaaaaaagagatgaaaagctgaatacttatacagactgagtttaaagaattttgagagctagagaaacagtgtaaagaatgagagaaatcatagtattttaaaatgagttttcaacaggaattgcatactcttcttaacaactcatatctccttcttcttctccacaaagacaacagtgttgttattcaaaggtaaaagcacctgctttctactcctggtcttggcaactggttggaccctgaggaaaggaatagcagggcctggaggtggggagcgtctactgatggtcactcagctctccttcctctctgaagggcctgtccaggaaactccgtaggggcactgaagagtaagatagagctgagtccacagtcaagagcagattcctatgagagcttcctggggcgaggtgtgggaacagaatgcagacaaatgaagttctcagaacactttctacagacccaggcctcctggactgtgctagtgttgagctctgattgtaccattatattaaaaagtaagctttttaatgtttaatttttaaaaaaatgaaagtcacagagttcatttagagagcaatagggcagaaagggagaatgaatcaaaagaacggaattcacactttctttggatttcccagaaagccacgaacacgaactatataaataaaaatgtgtggttatttgctatatttaggcagtaggttactactgtactctgaagcctgacatgggagtagcatagggaaaagaaaaaaaaaaaaacctgaacattttctttttaaaaatgttatttccagcatagctttcatacaggaactctgttttgaatgcagatgctttcttaagtcagtaggtagtggtgggtgggccacctggtcaaggagagtctctgcaactcaattctgccatcatctcgtagtacgcagaagggagatgagcagtccttacttgaataagcagttccttcagaagctccttgttttgtttggtttttttttttttttttttttttttttggtttgtttctttgttttccattgtagagatctaggagcaaagtgtattgctgtgtacatgagattattgcttttctgctcattttgtcttaagatggccttttgccctgtctgcatgagaaaacgaaatgtaaggaggatatgtattcaggatttggttgctagagcagtgaggtctgaatgcaaataggagcagtcagttaaaattgcagcccagctgtattttcattcaggttgttactatcgtattcatgtatcagaggtcaaaaggagatattattctataaaatggtatgcagggctctagagagaaactgttcagtgagatccatgtaaatatatgtgtggatatgattaaactacttttcaaagaatatcaatagttgtaatttttttcaaaacacaattaacattcaacccaagtagcagtttacatggtcttagacacgataatttttatttatccctcgtagacattgatgctagtgaaaagggattttttccctacatatttgggaagttttgtttttgttgttgtttttttttttgtttttgagagagagtctcgctctgtcgcccaggctggagtgcagtggcgtgatctaagctcactacaagctccgcctcctgggttcaggccattctcctgcctcagcctcccgagtagctgggactacaggcgcctgccaccacgcctggctaatttttttgtatttttgttagtagagacggggtttcaccgtgttagccaagatggtctcgatctcttgacctcgtgatccgcctgcctcggcctcccaaagtgctgggattacaggtgtgagtcaccgcgcctggccatatttgggaagtatttttacagataatcgaagatcagcttaataaagaaatacagcaaaaaaatgtaataaggaggggttacacactgaagaaagaattttacttgagtagacaaaggcgccattaaacacttgagttgcctttggctcttggtggtcacaaaaggctttatcaaaacagcaaattttagttaattaagagagagagctcactgaatgggccaggtccaagaaaacggtatgtagattcttgtcagcagagatctgccattgcagttgtatttggtaaaattccatcccaagttatttttctgatagtggaattatattatgcttacactgctggaactctatttaccctgttggagcattcctaaggaaggaagctgagtgtggggctctgaaattatttagaattgacctgagaatgaatctgcagagacaaagataaaatctttaataacataaccaaaggtagcaaaactgaccctgaggcacgcatttttctggaactgtctttgtccttgtaaatgaaagacacatacctgaaagggctacattatgaagactaaacaacaatttcagagaatgaattaaggccagtcttattagttagaggcattgtcaacaacaggctacttgactgcaagactcttctttttaccgccaccatgctttccatgggctcattattaaacatcccatctcatttttaatgtgccctatctggaactatgttaatttttgtgtagtgattactttgtggcctgaaattatattagttaaaacatattgttgctgtttcagattcccttttctaccatctggctataaaaaattatcaaagcgaagatataatacttgaatattgttattatttgtttagtaccaacagcagattccgtcctgaattcatgttgatgaggctaatatcctctgacccagagaacttagaatcttaggttagtatggaattatgtatccaaaggtaaatgagctcctgatactttacatgtcaatttcatgtgagaatgatcaggcaagtagattccagatataaataatccttgacaaatccttatctttttaatgtatgcttttagaagacaaatgtagagcattctcttcatgttgtaatgaattgtaatgagacctagtaattatccaaatgaggactcactggagtccacctacagtggtccagtttctcactttattttgaagctcacagtgggcaataaagtctatttttcatgtactactacgtaagagattctcagggccgaatgaggtggctcgcccctgtaatcccagcactttgagaggccgaggcaggaggatcacctgaggtcaggagtttgagaccagcctgaccaacatggagaaaccccgttctccagtaaaaatacaaaatcagccaggcgtggtggcgcgcatacctgtaatcccagctacttgggaggctgaggcaggagaatggcttgaacctgggaggcagaggttgcagtgagccgagatcgccccattgcactccagcctgggtgacaacagcgaaactccatctcaaaaaaaaaaaaaaagattctcagaaaatgggtctatgttttatgaacctcaaaagtgtaatataacctacgtttctctctaaagagagagaaaaagccccagtcctaagcaaggcaggctatacctcagtgcactgttgaggatctgacacgtgtggcatcttgacaacagaggtcaagagaatatgcagtggaagtggacaagcctttgtcatgtggtggcttatgagcttcaatactgacagggtcagaccttagcatttttgtgaaaaacatcattggaacggtgggatactgaagataaaggtgtgttcccagaggatcctgaattaggaacacatcaggcatctgccatcaacgtgggtatccgtgttatttttctttttctggatttgccatattacgagttcaaaatatattttctaccgtgtatggaaaaatgtgttcctcctctttctgttcatgcactcagtggcgcttattccttgtccactgtgtgttcttggccctggggatatattagtaaacaaacgcaaagtccttaccctcatgtgatggtatctagtattggggggcaaaggaggaaatcaaaaggtttttttttttttttcaagtaaaatataaggctgacagatggggagaagtgctaaggaaaacataaagcagtaagagtaggtgttccagttttagattttgatggccagggaaggcctcagtgtcaaagtgatgttaaagtgcacacctgaaagaggtgagggaggggagggaggaagtcctgtgggcttttggaagaagagctttttggacagagaatagcaagttccacaggtcctcgaataggagtgtgtgccatggaggcagattcaagcccagggacagaactgagagactgggccacgggaaaggggtggcccatgggttttctagggcattttaaggattcctggttgagaagggttttaaggatgagaattaaggatgagaaaccactggagtactttgggcagagctgacacactctgtcttgtgttttaacagggcagtgtcttttgaaaggagtgcacgtggagggcaaggagggaacagggagagcagtcaggcgactgtgggaggaacccaggcgcaaggtgatgagctcggtccagactagaaatgggagaggtactgagaaatggtgcagttctgaagatagatggacaaaacctgctgactgaaaggatgtgagacattagagaaaaagaagagtgaaggagcaaagcttttattgtcaaatttccttcttcaccacttaagaattatccctaagctttctccctaagtactagagtgctaatcatttcctagaacctgaaagtggttacagacacaggcatacctgagatactgcaggttcagttccagagtattgcaataaagcaaatatcacaataaaacaagtcacccaaatttttttgtttcccagtgcatataaaagttgtttatagcatacagtcatccgttaagtgtacaattgcattatgtcttaaaaaacaatgtatgtaccttaattttaaaataccttattgcctaccaccttctatcagaatagcaaaagaagctgctttcataaactgtcctagcagacttctacttacatgtcaggggccaaatctaggccacagggcagcagtggaaactaacagagacaagggtcatcacgcctgctttaaaccataattcctctcatggggctgggcacgctggcattcttaataaagcgcacagttccattagtacgaaagaagaggctgttcaggaagcaggaaacaccgtctgccgcaatatgattgatgagcttcttgggtccatgatgaccacttgaacactgatcattgttttcagtctctgagctggtgtgtcaaacctttaaaaagtaatttactggccgagtgtggtgcctcacgcttgtaatcccagcagtttgagaggccgaggcaggcggatcatgaggtcaggagatcaagaccatcctggccaacatggtgaaatcctgtctctactaacacaaaaaaaattagtcgggcttggtggtgcacgcctgcagtcccagctactccagaggctgaggcaggggaattgcttgaacccagtcggcagaggttgcagtgagccgagatcgcgccactgccctccagcctggagacagagcaagactccgtctcaaaaaaaaaaaaaaaaaaagtaatttactaatatacttcttgctgctcctttactttttcttacacaccagctttcatttaaaacttaaatttcacaatcggtcttaggaaaaaagatgcaaatcacatcttctctgaaaggaagaaaggaaataaagtctccaaatgatgctgttgcatagttaagaaatatgaccttcctactgcccagaaagagaatatgaggcgaaatcaatgaagagagaaatttcagttatgtttcttgcccttgctctccagagcatcattcagagttatttttctttattctgagacaattttattttgtcctcaaatcctctggatagcatttacatatgtggttgagtctgtaatcctagagatacttggctaaaactaatacctgctggttagtcctgaagttaaagttacgttttcctaaaatgttttgaagaggtatatttggtttggttcagtaaaatctagactcagagactggtaaaatgcaaagctacatttctgggttttgtaacctgtgtccctataagccttttttaagtcagaaatggggcacggcgtttgcaaactcatcaaccctcgaaggcttccttaacagcagggcaggctttgttttctggcccctctcacccccttttttctgctttgtctttacttctgatctgatgactcatgcactgccacacctctgtgctgtgccttttgtttgttgattgacacactgatgtaatttatttaagacaatagctttgcagctggagctgtaaaatgagtggatgagatggctttccttcatgtatttttcaggtggattttcctagtagtatcactttattcaaagactactggaaaactgtccctatcatcttttctccttttgtcccctttcaagtgatctaaacaatttttcttcattctcttttcattgtgtcaacgctccagcttcatgaaatcgtatgccttacgctggtttcctgaatctatttttaaacttacctttagactattttaccaaactttgtttctgttgggggtagttcttttctgttttttaatcttgccaccaaggcagtttaggagtagattaattaataaattcataaaatgaagaggcgtttagaatctttatgtcctgtggatattatcttgttcagtcctctgatttcatagtgcatctactgatgggtgatactgatgacattttttactagcaaaccttatgaaactatcatgtggccttctgagataatgcttagcatgctattctgtattttgttacttctttattgaaattggaatgtgtgtttagtaatgctttaaactgcaaataacaatacttgataaacagtggtttaacccataggatatttattattcatatttaacatgattccagaggttgtagccttagggttggatccagctcatcatgtcaacatggctctctccgtctttccatttttcctcaggtgcagcatgttgtcctatttcctcatacctactgcccatgtcacggggcagcagctttaggagtcatgtccatgttaaggagggaataagagtaagaggctaggccacgtgcagtggctcacgcctgtaatcccagcactttgggaggccgaggcgggtggatcacctgaggtcaggagttcgaggccagcctggccaacatggcgaaaccccatctctactaaaaatacaaaaattagctgggtgtggtggtgtgcgcctgtaatcctagacacttgggaggctgaggcaggagaattgctagaacccaggcggtggaggttgcggtgagctgagatcatgccactgcactccagcctggatgacagaatgagactctgtctcaaaaaaaaaaaagaatgagaggctaacaccagtgacttctccttaaagtctgtcccttttatcagaaagcaaaatctctttcccagaagccccccaaaagactcttccttacgtcttactggtcacaatatcacatggcccaacttagctacaagagagactgggaaagtaagtatctctggttttatcagtctttgtagtgaaaggcacatgagagtagaaggagttgagaatggcctttgactggccaaacaacagtgtctgtcagaggagtcatcctaaaatctatatacatataatctatattttcatatcaatggaggtaatatagcttaagagccgtgggttttgaactcagattgccttggttcaaatccgagtttcatttcttccttactttgactttgaacttgtctttgcctttgttgccttaactgtaaagcagggatggtaagttatcagttgtgtatgaatattgtgtgaatgacctgtgttaagctgttggtactcaataaatgtcatcatcggcaaccagcgctcacaccccacttgaatcctggccaaccccagaacatactgaatgtctagcagctttttcccattgttaaacgaagcagcttgaaaaggtagcacttctaaattactaacttaaaactgacacgtacaaaaccccaatctgactagaaaaatccctaagacggatgtatagtcaaaacagaatttgcctgcctttgttgggacagtttatatctgacatgttctttggtttagaaataaaacactttaagctttctataaattcttcatgcgttgaggcaggatggtggaatacttactttaccagaatgtgtcaaattaagaatctgagacccttctctaatttgcaacatatatgatagttctatatattgattgggatagaaactggaagaaaaaaaaagtgccagagccatggaaaaagaaaaaaaaaatcttagatatccaagagacggaggaatcaaggaactgtttgaaacatagtaggtactcagtacatagttggtaatgaatattgttgatttggaaaagcatcagaaaataacttgaaattctgccagcttcatactgttcatagcagcacctgttcataataaccggagaagtgggtaatccttgcagaaaagcaacggagggaaacccagagcagcttctagaaggtggtatggtctcataggggactgactgtccaggagattagccacggaatggtccctcaaggcaagcctttgtagggttacagggagtcagaaaaagagtaaacaaccatatccaagccagtttcttgtgaggcctggactacctggggaggctcaggtgactttggtacagagccacaagagccatgcagccgccgaaaaccagaggtgacagctcctccaacttagacccttctcatgcctgagtgttctagattcatggtgttccatctggtagccagcaactccaagttgacattctgtcagaatctagaacaaatgagaactaaaattctaacttaatttcttatctacataagacagtctctgtagttgcctctcatgtgcccagtaagtgcccaagtaatttgtcagtttgggaaatgaagcgaagtcttcaacagccattcacactctccaggtgggtaatacacaagtgtgctgcacacgtgcattttgaacagttttctgactaccgttgttctctggctttgccttcagaaaacccgctatgaaatgtatgtcagcattctcaaggaaggaggcaaagagctactgagtaacgatgaaagcgaggctgcaggactgaagaagtcgcactcgagtccttcgctgaacccggatacttctccaatcactgccaaagtcaagcgtaacgtgtcagagaggaaggatcaccgacctgaaacaccaagcattaagcaaaaagttacttagagtccatctgcggccaggaagtgctggtcatggagcaaaatagggtttttcaagatctttctggtaatccgtgaatatatttaaaaaaaaaaagtctgtgacaaaacggtgcattagtaattttttctattgtatatttttgttagtttctgtacagattgtctttgctcttgatttcttttgctttgatgatttttgcaacttgatagctaatgcaccttttctgtgaggaggaggggatcgtgatttcagaatgaattatgtatcccttctcttttggttttctcttgtttgcagtctgctcagttgttttatgtattctcatatcaactgttaaacttttttttaaggttaaagaatttaatccattgtgaaacacttaactggacaaactgtagttttagtaaattctagctggagttaatatacgcctttatatgtgaaatcttgcccagtcacagaggtagaattgagcactcacagatgctccagtaagaatcacagtgctgggaatctagttgctccaatatgaggcagcttcatgtgcagcttagcacttgttgttgagatcggaccctgctggaagcagggaaaagaagcgtgaagatcgtaggattgagaacttagggaagcacattagcttgcttgaagtgctgattccatttcagccaagcaagggaaagaggaagtggagtcattttgcctttgaaggctgaggaaagattgatacccagttaattttgtttgctaaaggatgggggcaataatcggcccttgaggagctgcagcagtaggcatgtgctcagtctgcaggaattgttacctcactcccacagggtctagactagaaatccatcatctctatcgttgatatccttccatccaggaatagatttttcttactctacatatgtgtgtgtgcgtgcgtgtgtgtgcgtgtgtgggcatggggttgtgtcctggttgtgatattgaggtcttccttcctaacaaattaatactaaaatgaaacagcttttcttgtgtccttaagacaaaataaggaaggaaaacgtagctgcagttgtccacgatggatattggttctttaaaatatatctgaaagtagtagtcagaatgaattatggttggaaaactgaggaatcttctggttgcaggtgcaaagtgactttgtttattcttgtctcagtctccttgatagccacttcactctgctactactcaactttctcctaaaaatacttcatctattttcagtcctttctttctgtctactcaaaatggttctattaactttgcagtcatgagcttgttccagttacagtccctttgaagttcagggtgataaacagaatattcttctgtagaggaagagaaaggagtgaaagtttagcccactgagacctagagctttgtgatttcctaaccttgaaactctgtaatccctaaagttaaaatctccgcaagtggcacaacttcagaactaatagtatcactttgatttttctttttcctcccttagaaagtttctctagttctatagtttatttgttgaaggtactatgaccaaagaatcagctgctctacaggaatagcatggttccagtgaattagagaaaacctgctgtaaagccatggtagtgtctaagtggtatgttattatgatgtactagcatttatttacagaattatttattaacgtttacttccttcccctctgtaaatgtccatgactattgcccagagaaggcttacccctctctagggttgcagttgctttctttgtaataagtattttgccacacctgtaaaaaaaaaaacctcacttttaactctctgccttgtttgggtaaaggcagtaactaagtttatgtttcagaactgcaaaacaaacaggatagttaccaatatggcccatgtatcagattgatttttgtagcctctcactgaatccaacatatccacaagcaagttatctgtctttctacctgataatctaaattatcaggatatttgttttctgcctaaatgtttatactaagccgaggggagagaggtacctagaccatgtcatctacaagcttcagtaactaaagaaaaaggaacttccctgagtggcttgaatgtgtttgcccacagtctatatctatgtatatagaatgtctgtatgtattttacttatttaatatacattgaatggtaccttgctacagtatttctgacatttagagtagtgttgaaatactcggctagcatcagcaccactatagcactgtccgtgtcatatgagtcactaatattaactccagggacttctggataggctaatagatcattggatacgaagggctcttttgaagcttcagtataccatgtttgcatagtttatctttaaaaacaactttaaaggttcttttgtgagccaggatctcagactgccgtagcatgatgctgtccatctttagcgcatgggctgagaacacctcttccctgaggcttctgaaggttgctgtctgtcatgagtgcatgaaggaggccaagagtttatgctatgggaggaaacagtcactgatttgcctagattctgagagtctggcccatagccaaccacattttcctttgggataatttatttcctgtggcatctagccagaagaaattgaggatgtttcctttcacagctgctccaagcctgttgcccaattcacggtacaagggagcaccccttccctttcctctgaaggtacgccacccacctccgtcgcccacctcagcgcccaggagccttgggacttccttccatatgataaatcattcttcttcacgtcaatacacttcatattaatttctagtacagaaaatcttgacagctatcagaatgccttggtcatagtgttgttgcaaaattgaccatacaggtggcccatgtataaaatctgaattttaggggtttgtccccacctcgcatgctggcttttacagggaggtgtctgggattcctcattagcaatcaaaacttaattactgggatgcagagtccttactttatcgccagcccgtaggcatttctgaagtgcacttttttgaaacatcattttgctaactctcagcagtgtctaattaaactgagcaatacttttgtgaattttaattaatctcagcaaaaccatgatgggagagagtcctctgatggaaatgtagtccctggattatgtgtaacctttttattcctcttagatgcagaggatagaaagcattttttggtgcagtggtcttgtggcaaacacaagaccctctatgcgtctccaactgttatcctaatctagaaaatgaggactggcccctgggcaaaagtgacatgaggaatttactctggaagaggaaaatctgggtggctttccaaggctaagataggtttgtatttcaccctgtggccaagctacagaacttctgagattgtggaagaatttttgcaaccagcagggaaagaggcctcttactgcctaaacacaaagttacactgagcttttctactgtcctttgcctattgctccctctatcatgtaaagatctgggaaggatgagaggcagggcctgcttgtcatgagctgcactcttttctttttaactaatcattgacaattggaagaaaattgacgttaaagaagtttctccattgtcttactaacaaaaccttttgggtttcattaattgtccttgaaattgagttcctttggcatttttccttgcagtcatcagttaagcatgttgcatcctgaattcacagaagtttagctttgcaggtttgaatctctgtaatttaactcccgtggacttggtcgagttttcagcaggttgggagccacctctcttcatttcagcagtgagtcatcccttgacttttcaaatgacagaattttttccaattgtaaaattagcactgtaaaacaaagaaccaaagtggcatcctaagagttgttaaacctgaagtctagtttatgaggaattgtccaagttggagtttaaatagtatctgcttttgtctcaaagcatctaagttattctgacagaaaatggtaagtcagctttgcaggcagatgcgcctctgggcctcctaccttgctccacagctttctggccatcttgtctcccaggccatgccactgctctgccacatgtcagcaaatttctttccaccagtcttatagcatcttacatgatcaaatcatcacagaataaccccgtgatagattattgatagcaatagagaggggctttgtcactgatttttctctcagattccttttccatctctcatccataaaggaaggactgaaatccaaaggcattctccttttgtacctacagtatccagaacccacgtgggcagccttctgcttatgacaataattggcccattgcatgcagagagaatgtcttcatagagagaatgtcattaaatacttgaatctgcatgacagtttgacttgaatgcaacagcaggaaaattttgcaagttacataattgtatatacagtaggttttcttaagtctcttcggttcatcctttgtaatttgtgtgtgtatctgtagtattgcaggcttttggagactattcttacaggcagtatgtcagtcatcaaagaaaatgctgtcacctgccattgttgtatttgtgggtatttatagttgtatgtatgtaaatgcatcagtgtgtagattgcatatcagtgtatggtacatgtacatcaaaattatttttgtccttaatcagtgtgatatgaaaagcaagtacaacctcataggactgattatataatgaagttgttgagagtatatatagtggtattgttttattaaacttaaactcaaataatattttgattaaaatttttaataagactttatgctagaaaattctttgagctttgaatcaccagggcaaaaatgactttcaactaaccttgtgaatcttttgcagtgtactgtgtgcaataccaagggcatagctccctgtaatttgggaaatacagaaagaaaagaaaaaaaaaaaaaaaggcagcctgtgcagtcttagtaactttagtattaagagcacttaaagtcaaactgacaattttgggcttattacaaaatgtgatgctttaaagcacacgttctttattgttgttgtaattagtccataaaaaatatagctttcggaagaattaagtacccaccatatcatttatgtatttgtgtatgttttacgggagatcaaaccactctcgtggtgccgcatccgtactcgcttgacttggaagaaatatcacaagcactaaagtatatcagggcatcccaggattgggtactgtatcctaggtttgcagttgcagaaattagcatctagtgtcacaggtaaaagaatttcaggaccaggtttaaactttattttaaatatttttatacttaggtctctttttcctgcctctccccaaagaagagccactggccttagttgtttgagcttactgcttatattatagagtgtaaataggtaactagagactaaaattttattaaccagcatgtttggtatatttaaagcagtgactgagtgtgtttgagtgagtggctgagtgcagtgtcttttgtttaaacacactgcctcgtgtctttgtagctgattcagagagtttgaattgtggggtgggagactaacttcagctccaggctgcagtaatgtgttggtagttacacttgaggcatttttttgttgttgttaattaactctatagtctcaaactatttttgcaaatatatcatttttcctaattggttcttgacgtgcagtggactggctctgtgaatgattggcagggtcttagttttgcgagagtatttccttctaagaattattgtgatctgcagaaacagccatttgattcaaaaatcatgtagaaaaggagtaggagaagcaaaacgtttcatttttgggccttaaccatttgaaatgtttggactttaaacataaagccatggagtttataaagccaagtaaccatttgatatggataataatatctactctagagagagtatatatatgcacattgatttttaatgctgttaagatacttttgtaaaactgtaggaacaagagtaattagaccaaattgaagcttaggggacagtaaagtggttgctttccatttagggtaaccatgcatgtggttagtcctctcctcctgagattcagaaccagttgactgtccccttaggtgtataaggagaaaagttgacatgtctgggacctctgacatgtgtacacatgcttgcacacatgcacacacagtgaatgttttaagttatacaaacataagaccttaagatgcaaagagccagaatattctaaagaggtgatgaacagagggggtggaaactgcatcacagatgttttccaagggccagggtggaatctgagctctagtgtctgactttgagatgcattatatttttaacacataaatgaggggatccatatcacattctttcttgtggaccaccaaattgaaggctttcttgtaattcacaagcagcagctctccagcatctctccgtagcctgggtgaagtcccagaagctggtgtgcatcattttccaaggtggcagagctgcttgctctgcagatcattcctttgagagaggagtacaagtgaagaaacaaggaggcacttcctgtaggagcactgatgtgccttgtccacactcccctctgagctttactggtaagagagctccgactgaacatgctgagcagttgagcacttttccatcagcaacaacagcgaggatggaaatggaaaggaaccgaactaaaatgcatttccctttgcagggcagagagctaagctcttaggaatagtgttatagaaataagcaccctaacttcaattcctgaaaatgttggttaatggagagaattttggagtttcacttaatattttcccatcggtcgccataaataagtcttcaggcgctcctagaagagtcccagcccaaggctcgattaaggaccacactgcaggtctgaggctcactgctctgagtcctgaacaccagagccctgcagagagtggtgataacacatcatctctgcaaagaggaacctctcccccggccgccacttcactcaggcttctactgagcagcaaggacagcctgggtttcaaatgccacttcccctgctttagggatccaggtgtcctgatagcgtgaccctgctgaggcaaggtatcaactccgagagtgactgagtcactgagcgtggcacatgaacaaacgtcatgacaaagattctctgagtgaagttaacaccacgtattttacctttgcaaaaaacaaactggcaccctgagttctaactacggacggacgatatctttgcctccacacccagattcctggaaatggctaacgtttcctttctaggggaagggtcgaggaatactcaagtgctagcttagcagctttgttcagtccagatcagagctgttaggtaaaggcctaaccacctccctgcagtctcttatatctcaagctttaggaacccatttctaaatgtacactagcggagaatttatattgtcagccttgattaccataggacaggcagaaaggcgataatttgtatcttttaatataaaagaagcttttaacttttccagcctattataataactgagttatattcactgtggctcaaactaattggcattgtggaacatttctttaccttcaaagttttctccaccaatcatttcagttctattgcagtcctggtgccatatgtcccctgcaaattgtgaaagtaattagtgacaaaatagcagcctgctccttttcaatggcgaaactgtcggcattagcagttttgggtaagctggcggtactataacacgtactggaaacctgttcctcatcaccacctaccagattctggaaatgccgtcttctagaaaacgatggcgtttgtggtggtcttcttttgaaaggaacagtaatttgtgtggatattgttaaagtgtttaaagaatattttgacaattaagtttacattttacaattgctttattttttattaaaatagttgtatataaatattaccctatttcactgttgttcaagtaaatctaaaccttgtagacaagtgagtcatctgatatgtatagaagctgtgatatatagagtacatttattgtgtaaatgtttatgaatataattgttcctgtgtttttataagttggggatattttgttgttttacggcaacaaaatttattgcatttaaatggtttttatgtaatagaaatcacgcaaaatagtgaaggatttaaaatatgtatatgatacatgtaaatgtacaaactttagaaagaaataaatccaacaaatttcaatcatttgagggaatgtttttatttgcttatttaagcagctataataatacctttaaaaatcaaataacaccacactctgcctgcctccataaaaacacaaccgcaagccccacattgaaagatgccaccagagtggttgaacacagtggtgagaaaatcagactaacaccgactcacctccacacatttctgtgaagatttgtgtttgaacacttcagagatctgttgtcttcactaaggggctttgagcaggggaggagaaaataaacttttagaagcaatttcaagagccatttgcattcccatttatttctcatcaaggcaaagagaccatgcagctatttattgtcctaaaatgcaaatgctgatctccaaatcactgccttactctgcctggtgtgtacctttttactcttttcatcaaacctaatgttaaaagtaagatccgttgacttggaaattcaaaaataaaatgccatcctattcacttctaaatattagaaaggatgtcttatgttgggggatttggactttttgaaacaagatcactggttacagcctctccagcacaaatgaacatgatgtatggcagagatcaaaattgctatgaggtgtaaatctcaaagaaatcaaagcattgtggggattgggagagctatatcctttaccatcccttcgctttcactccagcttggaatgtgaaatgtgtctgaagaccaccaggatggctgactagtagaaaggagagctttattggccatatcagtttgcaaactcggagagtggtctccgaagtataccgaaggtcctctctcttcaaagagggaagggaaggttggtttttatgcctcacagggcctgtattacacaatagagtcatacatattcagcagtgggtttggaggaaaagctatccatatgtatgtggggagccgagcgcatgtgcaataggtaaatatatgcatagcatacaccctacgttcattttagggcaaggtgttagcattaaaatgaggtgtaatttggctcttcatgttgaaaggtggcctataggatactaagtttgtgcacagtctctagaacctgctgaaactggtttgagctctgcagtttcttaccaggaaagaatgttcgtaaggctggtcttctttccaatcagcattgtagtagttgtattaataattcagagttagaaagggtcagacaatttgtctgtagctcttagtgttagggagtttatcaagaatgtggtttttcttgtagccataggaatttaggggccgtgctagtcaggccctaaagcctccacagcagataaatttgttcccttaacctcagggttcatcttagttgataaaagagtgtctatttcagtctctcagatcacaaactcaaatacgaatctctccttgtcagctgcctgtcctctggaggtggggggttttgtatcctgttgtattctctgtattgcacagttaataacagcaccagtgggactatagagatatttgataactcatagggggaaattaaacgtagagcaaattaaattgcataaggaataaatagaataaggatacaacaagcaactctaaatgtctcatctctagatcaattctattccacagaactgagattcatcaatgagactgctcaatcactgtccatttttattgataaattataagcaataggaaatattgcagacaggcatacatctttctaatattagtggagaagagtgtgcgttctgtatgctatagactagtgaacttgatattaattttgggcatatttttagagtaaattggaagggcagcagcaattaattggaagccagtgtgggttcccaaaaagaaatcttttcagactccatttattccctattttataagactaacctgtagattagaaaaacgcaggagacaaaatatctggaccataacaagggatttggcaaagtctttaatgaaatatgtctgggcaaaatgcagaaatattatctggacgttagtagagttggtgggtgtgaaaccacttgaacgacactgattaaaggatatgtatcaactcggaagagcatttctattgtcccgctgcaaagcttgccttttggccccatccattcaacattttaattaataacttgatggaagctgcagaaggcaagtttatgaaaaatggttatgtcataaagctgggagaaaatgattacactaaatgacagaatcaggatttgaaaaaaaatctcatcaggcagagaaatggggcaaattaatgcagaatgcaagagggtgtaatgtcttacacttcagttacaaaaaaaacaattaaacaaggtcaggataggacattgtgtcgcacagaatagcgagtaagtgggaaagaaagccttcaactgaaatccatagcaagctcgatgaaagtcaacagatgatgcaccaccaaaaacactagtgccatcttgggatcttgggttacattgatgtatggcttcttttttttttttttttttttttttttgagacatagtctcactctgtcgcccaggctggagtgcagtgacgcgatctcggctcactgcaagctccgcctcctgggttcacgctattctcctgcctcagcctcctgagtagctgggactacaggcgcccgccaccacgcccggctaattttttgtacttttagtagagacggggtttcactgtgttagccaggatggtctcgatcttctgatctcgtgatatgcccgcctcagcctcccaaagtgctgggattacaggcgtgagccaccacacccggcctgatgtatgtatggcttctaaaacaaggaaggtgagtcgcagtgcccttgacaccaaggctaaccctgggtaaattgcttgagacttggcacgtacacgaaacagagcatgtgcaaaagcagcagccagggtgccccaaaaatgggagcaattgagagaaatatggaaaacgtatgacctggaaatggttaacccatgcagaaccagggaagactggtcttcaatgtcaaaatgagtctttcgtgggagggacatgagaactgtcctatagcaatctaaagggtttaactagattagttattggaacttataaaaataagatggcagctcaacagaaaggaggcatttctagtattccaggctgtccatgacaaacaagttgtcagccagtggagcagttcaagtgtgcttgggcaacctcaggtggaaatactgagaactgagtgaggctttgggtaagtggttggattattatgatgatagacaatattattacaaata

SEQ ID NO: 2 - RNA, 11687 nt, Homo sapiens
  source 1..11687: mol_type = mRNA
aacaaagagcacgcggcgctggccgccggcactcgcgccctgaggctgcggccccggagcgcccggcggcggtttcggcgcgcggccgggctggcgatggaagatggaaggaaggagcgcagcggcagagacatttgtttgggtgaacaatgcatctgcacattcccagagtgttgccaaggccaaatatgaatttttatttggcagatctgaagggaaagctccagatactagtgatcatggaggaagcactttactcccaccaaatgtcacaaatgaatttccagaatatgggaccatggaggaaggtggagaaggcctaagggcttctctggaatttgatggtgaggctctgccatgccacccacaagagcagcagggtgtccagcctcttactggctgccactctgggctcgacagtgttacagaaggaccaaaagatgtcagagaggccccctctcaaagtcatctcaaggaacaaagtttacagcccattgactctttgatttcagctctgaaagccacagaagccagaatcatttccggaacattacaggctacaaaggtactggaccaagatgctgtttctagtttttcagttcagcaggtggaaaaagagctggacactgccagtcgtaaaacacagagagtcaacaaaacgctccctgctggccaaaaaaatttaccagaaatacctctttcagctgaagtaacaacggaggaaagtttttatttgagcatccagaaagatctcaccgcgctgttaactggagacactcaggcagagatttcccagataatgaataatgggaggaaaggggctgtctgtgtgcaggagccatcttgtcctttggcctccctcgggagctcagcagtgacctgccactctgcaggcagtgttggtttcttgaaagagcagaggtctgctcttgggagagagcacccagggggatgtgatcgaagcagctccatgggacgcccaggccgggtcaaacatgtggaatttcaaggagtggaaatactgtggacaggaggagacaagagagagacccagcatcctatagattttgagacatcactgcaaagaacagcctctcctgacagcaaagagtcttccaaagtgccacgccatctcatctcatcagctggtttgtgtaattcaagtagtttaactgagaatgtttgggatgaatcctggaaagctccttcagagaggcctggcactagctcggggacattttcccctgtgcgtcttgatgagagtggagaggatgaagtcttcctacaggaaaacaaacagcatcttgagaagacacctaaaccagagagagacagggaaaggatcagcgaacaagaggagcacgttaagggggaagatgaagacatccttgggcctggatatacggaggactccaccgacgtgtacagctcccagtttgaaaccattttggacaacacttctttatactacagtgcagagtccctggagacattatactcagagcctgatagctattttagctttgaaatgcccctcactccaatgatacaacagcgcattaaagaaggtggtcagttcttggagaggacatcagggggaggacatcaggatatcctgagtgtgtctgcagatggtggcatcgtgatgggctattctagtggcgtcaccaatgggctgaatgatgccagcgactccatctacacgaaaggcaccccggagattgctttctggggaagcaatgctggggtgaaaacaacacggctagaagctcattctgaaatggggagcactgaaattttggaaaaggagaccccagaaaatctcagtaatggtaccagcagcaatgtggaagcagccaaaaggttggccaaacgcctttatcagctggacagattcaaaagatcagatgttgcaaaacaccttggcaagaacaacgaatttagcaaactagttgcagaagaatatctgaagttttttgattttacaggaatgacgctggatcagtcactcaggtatttctttaaagcattctctcttgtgggagaaactcaagaacgagagagagttttaatacacttctccaatagatatttttattgtaacccagataccattgcttcacaagatggagtccattgccttacctgtgcaataatgcttcttaataccgatctacatggccacaatattggaaagaagatgacctgtcaggagttcattgcaaatctgcaaggggtaaatgagggtgttgatttctccaaggatctgctgaaagctctgtacaactcaatcaagaatgagaagcttgaatgggcagtagatgatgaagagaaaaaaaagtctccctcagaaagtactgaggagaaagctaacggaacacatccaaagaccatcagtcgtattggaagtactactaacccatttttggacattcctcatgatccaaatgctgctgtgtacaaaagtggattcttggctcggaaaattcatgcagatatggatggaaagaagactccaagaggaaaacgaggatggaaaaccttttatgctgtactgaagggaacagttctttacttgcaaaaggatgaatacaagccagaaaaggccttgtctgaagaggacttgaaaaacgctgtgagtgtgcaccacgcattggcatccaaggccacggactatgagaagaaaccaaacgtgtttaaacttaaaactgccgactggagggtcttgctttttcaaactcagagcccagaggaaatgcaagggtggataaacaaaatcaattgtgtggcagctgtattttctgcaccaccatttccagcagcaatcggctctcagaagaagtttagccgcccacttctgcctgccactacaacaaaactgtctcaggaggagcaactgaagtcacatgaaagtaagctgaagcagatcaccaccgagctggccgagcaccgctcatatccccccgacaagaaggtcaaagccaaggacgtcgatgagtacaaactgaaagaccactatctggagtttgagaaaacccgctatgaaatgtatgtcagcattctcaaggaaggaggcaaagagctactgagtaacgatgaaagcgaggctgcaggactgaagaagtcgcactcgagtccttcgctgaacccggatacttctccaatcactgccaaagtcaagcgtaacgtgtcagagaggaaggatcaccgacctgaaacaccaagcattaagcaaaaagttacttagagtccatctgcggccaggaagtgctggtcatggagcaaaatagggtttttcaagatctttctggtaatccgtgaatatatttaaaaaaaaaaagtctgtgacaaaacggtgcattagtaattttttctattgtatatttttgttagtttctgtacagattgtctttgctcttgatttcttttgctttgatgatttttgcaacttgatagctaatgcaccttttctgtgaggaggaggggatcgtgatttcagaatgaattatgtatcccttctcttttggttttctcttgtttgcagtctgctcagttgttttatgtattctcatatcaactgttaaacttttttttaaggttaaagaatttaatccattgtgaaacacttaactggacaaactgtagttttagtaaattctagctggagttaatatacgcctttatatgtgaaatcttgcccagtcacagaggtagaattgagcactcacagatgctccagtaagaatcacagtgctgggaatctagttgctccaatatgaggcagcttcatgtgcagcttagcacttgttgttgagatcggaccctgctggaagcagggaaaagaagcgtgaagatcgtaggattgagaacttagggaagcacattagcttgcttgaagtgctgattccatttcagccaagcaagggaaagaggaagtggagtcattttgcctttgaaggctgaggaaagattgatacccagttaattttgtttgctaaaggatgggggcaataatcggcccttgaggagctgcagcagtaggcatgtgctcagtctgcaggaattgttacctcactcccacagggtctagactagaaatccatcatctctatcgttgatatccttccatccaggaatagatttttcttactctacatatgtgtgtgtgcgtgcgtgtgtgtgcgtgtgtgggcatggggttgtgtcctggttgtgatattgaggtcttccttcctaacaaattaatactaaaatgaaacagcttttcttgtgtccttaagacaaaataaggaaggaaaacgtagctgcagttgtccacgatggatattggttctttaaaatatatctgaaagtagtagtcagaatgaattatggttggaaaactgaggaatcttctggttgcaggtgcaaagtgactttgtttattcttgtctcagtctccttgatagccacttcactctgctactactcaactttctcctaaaaatacttcatctattttcagtcctttctttctgtctactcaaaatggttctattaactttgcagtcatgagcttgttccagttacagtccctttgaagttcagggtgataaacagaatattcttctgtagaggaagagaaaggagtgaaagtttagcccactgagacctagagctttgtgatttcctaaccttgaaactctgtaatccctaaagttaaaatctccgcaagtggcacaacttcagaactaatagtatcactttgatttttctttttcctcccttagaaagtttctctagttctatagtttatttgttgaaggtactatgaccaaagaatcagctgctctacaggaatagcatggttccagtgaattagagaaaacctgctgtaaagccatggtagtgtctaagtggtatgttattatgatgtactagcatttatttacagaattatttattaacgtttacttccttcccctctgtaaatgtccatgactattgcccagagaaggcttacccctctctagggttgcagttgctttctttgtaataagtattttgccacacctgtaaaaaaaaaaacctcacttttaactctctgccttgtttgggtaaaggcagtaactaagtttatgtttcagaactgcaaaacaaacaggatagttaccaatatggcccatgtatcagattgatttttgtagcctctcactgaatccaacatatccacaagcaagttatctgtctttctacctgataatctaaattatcaggatatttgttttctgcctaaatgtttatactaagccgaggggagagaggtacctagaccatgtcatctacaagcttcagtaactaaagaaaaaggaacttccctgagtggcttgaatgtgtttgcccacagtctatatctatgtatatagaatgtctgtatgtattttacttatttaatatacattgaatggtaccttgctacagtatttctgacatttagagtagtgttgaaatactcggctagcatcagcaccactatagcactgtccgtgtcatatgagtcactaatattaactccagggacttctggataggctaatagatcattggatacgaagggctcttttgaagcttcagtataccatgtttgcatagtttatctttaaaaacaactttaaaggttcttttgtgagccaggatctcagactgccgtagcatgatgctgtccatctttagcgcatgggctgagaacacctcttccctgaggcttctgaaggttgctgtctgtcatgagtgcatgaaggaggccaagagtttatgctatgggaggaaacagtcactgatttgcctagattctgagagtctggcccatagccaaccacattttcctttgggataatttatttcctgtggcatctagccagaagaaattgaggatgtttcctttcacagctgctccaagcctgttgcccaattcacggtacaagggagcaccccttccctttcctctgaaggtacgccacccacctccgtcgcccacctcagcgcccaggagccttgggacttccttccatatgataaatcattcttcttcacgtcaatacacttcatattaatttctagtacagaaaatcttgacagctatcagaatgccttggtcatagtgttgttgcaaaattgaccatacaggtggcccatgtataaaatctgaattttaggggtttgtccccacctcgcatgctggcttttacagggaggtgtctgggattcctcattagcaatcaaaacttaattactgggatgcagagtccttactttatcgccagcccgtaggcatttctgaagtgcacttttttgaaacatcattttgctaactctcagcagtgtctaattaaactgagcaatacttttgtgaattttaattaatctcagcaaaaccatgatgggagagagtcctctgatggaaatgtagtccctggattatgtgtaacctttttattcctcttagatgcagaggatagaaagcattttttggtgcagtggtcttgtggcaaacacaagaccctctatgcgtctccaactgttatcctaatctagaaaatgaggactggcccctgggcaaaagtgacatgaggaatttactctggaagaggaaaatctgggtggctttccaaggctaagataggtttgtatttcaccctgtggccaagctacagaacttctgagattgtggaagaatttttgcaaccagcagggaaagaggcctcttactgcctaaacacaaagttacactgagcttttctactgtcctttgcctattgctccctctatcatgtaaagatctgggaaggatgagaggcagggcctgcttgtcatgagctgcactcttttctttttaactaatcattgacaattggaagaaaattgacgttaaagaagtttctccattgtcttactaacaaaaccttttgggtttcattaattgtccttgaaattgagttcctttggcatttttccttgcagtcatcagttaagcatgttgcatcctgaattcacagaagtttagctttgcaggtttgaatctctgtaatttaactcccgtggacttggtcgagttttcagcaggttgggagccacctctcttcatttcagcagtgagtcatcccttgacttttcaaatgacagaattttttccaattgtaaaattagcactgtaaaacaaagaaccaaagtggcatcctaagagttgttaaacctgaagtctagtttatgaggaattgtccaagttggagtttaaatagtatctgcttttgtctcaaagcatctaagttattctgacagaaaatggtaagtcagctttgcaggcagatgcgcctctgggcctcctaccttgctccacagctttctggccatcttgtctcccaggccatgccactgctctgccacatgtcagcaaatttctttccaccagtcttatagcatcttacatgatcaaatcatcacagaataaccccgtgatagattattgatagcaatagagaggggctttgtcactgatttttctctcagattccttttccatctctcatccataaaggaaggactgaaatccaaaggcattctccttttgtacctacagtatccagaacccacgtgggcagccttctgcttatgacaataattggcccattgcatgcagagagaatgtcttcatagagagaatgtcattaaatacttgaatctgcatgacagtttgacttgaatgcaacagcaggaaaattttgcaagttacataattgtatatacagtaggttttcttaagtctcttcggttcatcctttgtaatttgtgtgtgtatctgtagtattgcaggcttttggagactattcttacaggcagtatgtcagtcatcaaagaaaatgctgtcacctgccattgttgtatttgtgggtatttatagttgtatgtatgtaaatgcatcagtgtgtagattgcatatcagtgtatggtacatgtacatcaaaattatttttgtccttaatcagtgtgatatgaaaagcaagtacaacctcataggactgattatataatgaagttgttgagagtatatatagtggtattgttttattaaacttaaactcaaataatattttgattaaaatttttaataagactttatgctagaaaattctttgagctttgaatcaccagggcaaaaatgactttcaactaaccttgtgaatcttttgcagtgtactgtgtgcaataccaagggcatagctccctgtaatttgggaaatacagaaagaaaagaaaaaaaaaaaaaaaggcagcctgtgcagtcttagtaactttagtattaagagcacttaaagtcaaactgacaattttgggcttattacaaaatgtgatgctttaaagcacacgttctttattgttgttgtaattagtccataaaaaatatagctttcggaagaattaagtacccaccatatcatttatgtatttgtgtatgttttacgggagatcaaaccactctcgtggtgccgcatccgtactcgcttgacttggaagaaatatcacaagcactaaagtatatcagggcatcccaggattgggtactgtatcctaggtttgcagttgcagaaattagcatctagtgtcacaggtaaaagaatttcaggaccaggtttaaactttattttaaatatttttatacttaggtctctttttcctgcctctccccaaagaagagccactggccttagttgtttgagcttactgcttatattatagagtgtaaataggtaactagagactaaaattttattaaccagcatgtttggtatatttaaagcagtgactgagtgtgtttgagtgagtggctgagtgcagtgtcttttgtttaaacacactgcctcgtgtctttgtagctgattcagagagtttgaattgtggggtgggagactaacttcagctccaggctgcagtaatgtgttggtagttacacttgaggcatttttttgttgttgttaattaactctatagtctcaaactatttttgcaaatatatcatttttcctaattggttcttgacgtgcagtggactggctctgtgaatgattggcagggtcttagttttgcgagagtatttccttctaagaattattgtgatctgcagaaacagccatttgattcaaaaatcatgtagaaaaggagtaggagaagcaaaacgtttcatttttgggccttaaccatttgaaatgtttggactttaaacataaagccatggagtttataaagccaagtaaccatttgatatggataataatatctactctagagagagtatatatatgcacattgatttttaatgctgttaagatacttttgtaaaactgtaggaacaagagtaattagaccaaattgaagcttaggggacagtaaagtggttgctttccatttagggtaaccatgcatgtggttagtcctctcctcctgagattcagaaccagttgactgtccccttaggtgtataaggagaaaagttgacatgtctgggacctctgacatgtgtacacatgcttgcacacatgcacacacagtgaatgttttaagttatacaaacataagaccttaagatgcaaagagccagaatattctaaagaggtgatgaacagagggggtggaaactgcatcacagatgttttccaagggccagggtggaatctgagctctagtgtctgactttgagatgcattatatttttaacacataaatgaggggatccatatcacattctttcttgtggaccaccaaattgaaggctttcttgtaattcacaagcagcagctctccagcatctctccgtagcctgggtgaagtcccagaagctggtgtgcatcattttccaaggtggcagagctgcttgctctgcagatcattcctttgagagaggagtacaagtgaagaaacaaggaggcacttcctgtaggagcactgatgtgccttgtccacactcccctctgagctttactggtaagagagctccgactgaacatgctgagcagttgagcacttttccatcagcaacaacagcgaggatggaaatggaaaggaaccgaactaaaatgcatttccctttgcagggcagagagctaagctcttaggaatagtgttatagaaataagcaccctaacttcaattcctgaaaatgttggttaatggagagaattttggagtttcacttaatattttcccatcggtcgccataaataagtcttcaggcgctcctagaagagtcccagcccaaggctcgattaaggaccacactgcaggtctgaggctcactgctctgagtcctgaacaccagagccctgcagagagtggtgataacacatcatctctgcaaagaggaacctctcccccggccgccacttcactcaggcttctactgagcagcaaggacagcctgggtttcaaatgccacttcccctgctttagggatccaggtgtcctgatagcgtgaccctgctgaggcaaggtatcaactccgagagtgactgagtcactgagcgtggcacatgaacaaacgtcatgacaaagattctctgagtgaagttaacaccacgtattttacctttgcaaaaaacaaactggcaccctgagttctaactacggacggacgatatctttgcctccacacccagattcctggaaatggctaacgtttcctttctaggggaagggtcgaggaatactcaagtgctagcttagcagctttgttcagtccagatcagagctgttaggtaaaggcctaaccacctccctgcagtctcttatatctcaagctttaggaacccatttctaaatgtacactagcggagaatttatattgtcagccttgattaccataggacaggcagaaaggcgataatttgtatcttttaatataaaagaagcttttaacttttccagcctattataataactgagttatattcactgtggctcaaactaattggcattgtggaacatttctttaccttcaaagttttctccaccaatcatttcagttctattgcagtcctggtgccatatgtcccctgcaaattgtgaaagtaattagtgacaaaatagcagcctgctccttttcaatggcgaaactgtcggcattagcagttttgggtaagctggcggtactataacacgtactggaaacctgttcctcatcaccacctaccagattctggaaatgccgtcttctagaaaacgatggcgtttgtggtggtcttcttttgaaaggaacagtaatttgtgtggatattgttaaagtgtttaaagaatattttgacaattaagtttacattttacaattgctttattttttattaaaatagttgtatataaatattaccctatttcactgttgttcaagtaaatctaaaccttgtagacaagtgagtcatctgatatgtatagaagctgtgatatatagagtacatttattgtgtaaatgtttatgaatataattgttcctgtgtttttataagttggggatattttgttgttttacggcaacaaaatttattgcatttaaatggtttttatgtaatagaaatcacgcaaaatagtgaaggatttaaaatatgtatatgatacatgtaaatgtacaaactttagaaagaaataaatccaacaaatttcaatca

SEQ ID NO: 3 - DNA, 19 bp, synthetic construct
  source 1..19: mol_type = other DNA
gcaaaacaccttggcaaga

SEQ ID NO: 4 - DNA, 21 bp, synthetic construct
  source 1..21: mol_type = other DNA
ctcgttcttgagtttctccca

SEQ ID NO: 5 - DNA, 24 bp, synthetic construct
  source 1..24: mol_type = other DNA
acctgagtgactgatccagcgtca

SEQ ID NO: 6 - DNA, 21 bp, synthetic construct
  source 1..21: mol_type = other DNA
cttggctcggaaaattcatgc

SEQ ID NO: 7 - DNA, 24 bp, synthetic construct
  source 1..24: mol_type = other DNA
tcatccttttgcaagtaaagaact

SEQ ID NO: 8 - DNA, 28 bp, synthetic construct
  source 1..28: mol_type = other DNA
aggttttccatcctcgttttcctcttgg

SEQ ID NO: 9 - DNA, 20 bp, synthetic construct
  source 1..20: mol_type = other DNA
gatctgaagggaaagctcca

SEQ ID NO: 10 - DNA, 22 bp, synthetic construct
  source 1..22: mol_type = other DNA
cctcaccatcaaattccagaga

SEQ ID NO: 11 - DNA, 23 bp, synthetic construct
  source 1..23: mol_type = other DNA
taggccttctccaccttcctcca

SEQ ID NO: 12 - DNA, 19 bp, synthetic construct
  source 1..19: mol_type = other DNA
gaaggtgaaggtcggagtc

SEQ ID NO: 13 - DNA, 20 bp, synthetic construct
  source 1..20: mol_type = other DNA
gaagatggtgatgggatttc

SEQ ID NO: 14 - DNA, 20 bp, synthetic construct
  source 1..20: mol_type = other DNA
caagcttcccgttctcagcc

SEQ ID NO: 15 - DNA, 19 bp, synthetic construct
  source 1..19: mol_type = other DNA
tgaatgatgccagcgactc

SEQ ID NO: 16 - DNA, 22 bp, synthetic construct
  source 1..22: mol_type = other DNA
cttctagccgtgttgttttcac

SEQ ID NO: 17 - DNA, 21 bp, synthetic construct
  source 1..21: mol_type = other DNA
aaagcaatctccggggtgcct

SEQ ID NO: 18-19 - skipped (2 entries)

SEQ ID NO: 20 - DNA, 16 bp, synthetic construct
  source 1..16: mol_type = other DNA
ggagtaaagtgcttcc

SEQ ID NO: 21 - DNA, 16 bp, synthetic construct
  source 1..16: mol_type = other DNA
gttttacgactggcag

SEQ ID NO: 22 - DNA, 16 bp, synthetic construct
  source 1..16: mol_type = other DNA
gcttcgatcacatccc

SEQ ID NO: 23 - DNA, 16 bp, synthetic construct
  source 1..16: mol_type = other DNA
cgtcggtggagtcctc

SEQ ID NO: 24 - DNA, 16 bp, synthetic construct
  source 1..16: mol_type = other DNA
cttctttaatgcgctg

SEQ ID NO: 25 - DNA, 16 bp, synthetic construct
  source 1..16: mol_type = other DNA
gcaactagtttgctaa

SEQ ID NO: 26 - DNA, 16 bp, synthetic construct
  source 1..16: mol_type = other DNA
cggtattaagaagcat

SEQ ID NO: 27 - DNA, 16 bp, synthetic construct
  source 1..16: mol_type = other DNA
cagtactttctgaggg

SEQ ID NO: 28 - DNA, 16 bp, synthetic construct
  source 1..16: mol_type = other DNA
atgaattttccgagcc

SEQ ID NO: 29 - DNA, 16 bp, synthetic construct
  source 1..16: mol_type = other DNA
cgttactcagtagctc

SEQ ID NO: 30 - DNA, 16 bp, synthetic construct
  source 1..16: mol_type = other DNA
tacgcttgactttggc

SEQ ID NO: 31 - DNA, 16 bp, synthetic construct
  source 1..16: mol_type = other DNA
agctatcaagttgcaa

SEQ ID NO: 32 - DNA, 16 bp, synthetic construct
  source 1..16: mol_type = other DNA
aagtttaacagttgat

SEQ ID NO: 33 - DNA, 16 bp, synthetic construct
  source 1..16: mol_type = other DNA
gcaactagattcccag

SEQ ID NO: 34 - DNA, 16 bp, synthetic construct
  source 1..16: mol_type = other DNA
cctacgatcttcacgc

SEQ ID NO: 35 - DNA, 16 bp, synthetic construct
  source 1..16: mol_type = other DNA
atggaatcagcacttc

SEQ ID NO: 36 - DNA, 16 bp, synthetic construct
  source 1..16: mol_type = other DNA
ggatatcaacgataga

SEQ ID NO: 37 - DNA, 16 bp, synthetic construct
  source 1..16: mol_type = other DNA
acataccacttagaca

SEQ ID NO: 38 - DNA, 16 bp, synthetic construct
  source 1..16: mol_type = other DNA
atctgatacatgggcc

SEQ ID NO: 39 - DNA, 16 bp, synthetic construct
  source 1..16: mol_type = other DNA
tctaggtacctctctc

SEQ ID NO: 40 - DNA, 16 bp, synthetic construct
  source 1..16: mol_type = other DNA
gcaaggtaccattcaa

SEQ ID NO: 41 - DNA, 16 bp, synthetic construct
  source 1..16: mol_type = other DNA
ctcatatgacacggac

SEQ ID NO: 42 - DNA, 16 bp, synthetic construct
  source 1..16: mol_type = other DNA
tatactgaagcttcaa

SEQ ID NO: 43 - DNA, 16 bp, synthetic construct
  source 1..16: mol_type = other DNA
taggcaaatcagtgac

SEQ ID NO: 44 - DNA, 16 bp, synthetic construct
  source 1..16: mol_type = other DNA
taggataacagttgga

SEQ ID NO: 45 - DNA, 16 bp, synthetic construct
  source 1..16: mol_type = other DNA
atctttacatgataga

SEQ ID NO: 46 - DNA, 16 bp, synthetic construct
  source 1..16: mol_type = other DNA
ctcataaactagactt

SEQ ID NO: 47 - DNA, 16 bp, synthetic construct
  source 1..16: mol_type = other DNA
tgctatcaataatcta

SEQ ID NO: 48 - DNA, 16 bp, synthetic construct
  source 1..16: mol_type = other DNA
gcctgtaagaatagtc

SEQ ID NO: 49 - DNA, 16 bp, synthetic construct
  source 1..16: mol_type = other DNA
gtattgcacacagtac

SEQ ID NO: 50 - DNA, 16 bp, synthetic construct
  source 1..16: mol_type = other DNA
taggatacagtaccca

SEQ ID NO: 51 - DNA, 16 bp, synthetic construct
  source 1..16: mol_type = other DNA
gcagtaagctcaaaca

SEQ ID NO: 52 - DNA, 16 bp, synthetic construct
  source 1..16: mol_type = other DNA
gctgaagttagtctcc

SEQ ID NO: 53 - DNA, 16 bp, synthetic construct
  source 1..16: mol_type = other DNA
aaatggttaaggccca

SEQ ID NO: 54 - DNA, 16 bp, synthetic construct
  source 1..16: mol_type = other DNA
ctccttatacacctaa

SEQ ID NO: 55 - DNA, 16 bp, synthetic construct
  source 1..16: mol_type = other DNA
cagtcggagctctctt

SEQ ID NO: 56 - DNA, 16 bp, synthetic construct
  source 1..16: mol_type = other DNA
ctattcctaagagctt

SEQ ID NO: 57 - DNA, 16 bp, synthetic construct
  source 1..16: mol_type = other DNA
cttatttatggcgacc

SEQ ID NO: 58 - DNA, 16 bp, synthetic construct
  source 1..16: mol_type = other DNA
gcagggtcacgctatc

SEQ ID NO: 59 - DNA, 16 bp, synthetic construct
  source 1..16: mol_type = other DNA
aatgggttcctaaagc

SEQ ID NO: 60 - DNA, 16 bp, synthetic construct
  source 1..16: mol_type = other DNA
tacaaattatcgcctt

SEQ ID NO: 61 - DNA, 16 bp, synthetic construct
  source 1..16: mol_type = other DNA
attagtttgagccaca

SEQ ID NO: 62 - DNA, 16 bp, synthetic construct
  source 1..16: mol_type = other DNA
cttacccaaaactgct

SEQ ID NO: 63 - DNA, 16 bp, synthetic construct
  source 1..16: mol_type = other DNA
ccagaatctggtaggt

SEQ ID NO: 64 - DNA, 16 bp, synthetic construct
  source 1..16: mol_type = other DNA
aattttgttgccgtaa

SEQ ID NO: 65 - DNA, 16 bp, synthetic construct
  source 1..16: mol_type = other DNA
gataatcaatctaggt

SEQ ID NO: 66 - DNA, 16 bp, synthetic construct
  source 1..16: mol_type = other DNA
agtcaatatgtatcag

SEQ ID NO: 67 - DNA, 16 bp, synthetic construct
  source 1..16: mol_type = other DNA
agacattgcagctcta

SEQ ID NO: 68 - DNA, 16 bp, synthetic construct
  source 1..16: mol_type = other DNA
atacactgatctatgt

SEQ ID NO: 69 - DNA, 16 bp, synthetic construct
  source 1..16: mol_type = other DNA
agactaaagttatcaa

SEQ ID NO: 70 - DNA, 16 bp, synthetic construct
  source 1..16: mol_type = other DNA
aatattaacacggcac

SEQ ID NO: 71 - DNA, 16 bp, synthetic construct
  source 1..16: mol_type = other DNA
gaaattatggcaccct

SEQ ID NO: 72 - DNA, 16 bp, synthetic construct
  source 1..16: mol_type = other DNA
gtattattgataggcg

SEQ ID NO: 73 - DNA, 16 bp, synthetic construct
  source 1..16: mol_type = other DNA
gctagatgcctatctt

SEQ ID NO: 74 - DNA, 16 bp, synthetic construct
  source 1..16: mol_type = other DNA
gacacaatggccagtt

SEQ ID NO: 75 - DNA, 16 bp, synthetic construct
  source 1..16: mol_type = other DNA
cttattagtaatggga

SEQ ID NO: 76 - DNA, 16 bp, synthetic construct
  source 1..16: mol_type = other DNA
tatactaagttgctgc

SEQ ID NO: 77 - DNA, 16 bp, synthetic construct
  source 1..16: mol_type = other DNA
cttattaaccccagtt

SEQ ID NO: 78 - DNA, 16 bp, synthetic construct
  source 1..16: mol_type = other DNA
ctgggatctggacgcg

SEQ ID NO: 79 - DNA, 16 bp, synthetic construct
  source 1..16: mol_type = other DNA
gatctgtaactactca

SEQ ID NO: 80 - DNA, 16 bp, synthetic construct
  source 1..16: mol_type = other DNA
ttatcccatgccgtac

SEQ ID NO: 81 - DNA, 16 bp, synthetic construct
  source 1..16: mol_type = other DNA
ctgctagccacttaac

SEQ ID NO: 82 - DNA, 16 bp, synthetic construct
  source 1..16: mol_type = other DNA
cccagtcagaacaact

SEQ ID NO: 83 - DNA, 16 bp, synthetic construct
  source 1..16: mol_type = other DNA
cgccaccactagtcac

SEQ ID NO: 84 - DNA, 16 bp, synthetic construct
  source 1..16: mol_type = other DNA
ccagaagcctaaaccg

SEQ ID NO: 85 - DNA, 16 bp, synthetic construct
  source 1..16: mol_type = other DNA
catcaccagaggaagt

SEQ ID NO: 86 - DNA, 16 bp, synthetic construct
  source 1..16: mol_type = other DNA
ctgaaacgatccttac

SEQ ID NO: 87 - DNA, 16 bp, synthetic construct
  source 1..16: mol_type = other DNA
acggaaataatggtgc

SEQ ID NO: 88 - DNA, 16 bp, synthetic construct
  source 1..16: mol_type = other DNA
aatcctacattcagta

SEQ ID NO: 89 - DNA, 16 bp, synthetic construct
  source 1..16: mol_type = other DNA
agctataggtactctt

SEQ ID NO: 90 - DNA, 16 bp, synthetic construct
  source 1..16: mol_type = other DNA
tatattagatggtgca

SEQ ID NO: 91 - DNA, 16 bp, synthetic construct
  source 1..16: mol_type = other DNA
taatttatgcatccct

SEQ ID NO: 92 - DNA, 16 bp, synthetic construct
  source 1..16: mol_type = other DNA
attataatgtacgagt

SEQ ID NO: 93 - DNA, 16 bp, synthetic construct
  source 1..16: mol_type = other DNA
ttaattatagtgtcgc

SEQ ID NO: 94 - DNA, 16 bp, synthetic construct
  source 1..16: mol_type = other DNA
gatagtaaatcaaacg

SEQ ID NO: 95 - DNA, 16 bp, synthetic construct
  source 1..16: mol_type = other DNA
gtatatcacaagctct

SEQ ID NO: 96 - DNA, 16 bp, synthetic construct
  source 1..16: mol_type = other DNA
taatttatcaaccccc

SEQ ID NO: 97 - DNA, 16 bp, synthetic construct
  source 1..16: mol_type = other DNA
attattaactggactc

SEQ ID NO: 98 - DNA, 16 bp, synthetic construct
  source 1..16: mol_type = other DNA
gggagtaaagtgcttc

SEQ ID NO: 99 - DNA, 16 bp, synthetic construct
  source 1..16: mol_type = other DNA
agcgcggtgagatctt

SEQ ID NO: 100 - DNA, 16 bp, synthetic construct
  source 1..16: mol_type = other DNA
tataggatgctgggtc

SEQ ID NO: 101 - DNA, 16 bp, synthetic construct
  source 1..16: mol_type = other DNA
gagtataatgtctcca

SEQ ID NO: 102 - DNA, 16 bp, synthetic construct
  source 1..16: mol_type = other DNA
caggatatcctgatgt

SEQ ID NO: 103 - DNA, 16 bp, synthetic construct
  source 1..16: mol_type = other DNA
ctgcaactagtttgct

SEQ ID NO: 104 - DNA, 16 bp, synthetic construct
  source 1..16: mol_type = other DNA
atcggtattaagaagc

SEQ ID NO: 105 - DNA, 16 bp, synthetic construct
  source 1..16: mol_type = other DNA
tagtacttccaatacg

SEQ ID NO: 106 - DNA, 16 bp, synthetic construct
  source 1..16: mol_type = other DNA
catagtccgtggcctt

SEQ ID NO: 107 - DNA, 16 bp, synthetic construct
  source 1..16: mol_type = other DNA
tcagcgaaggactcga

SEQ ID NO: 108 - DNA, 16 bp, synthetic construct
  source 1..16: mol_type = other DNA
aggtcggtgatccttc

SEQ ID NO: 109 - DNA, 16 bp, synthetic construct
  source 1..16: mol_type = other DNA
gtgcattagctatcaa

SEQ ID NO: 110 - DNA, 16 bp, synthetic construct
  source 1..16: mol_type = other DNA
tatattaactccagct

SEQ ID NO: 111 - DNA, 16 bp, synthetic construct
  source 1..16: mol_type = other DNA
agcaactagattccca

SEQ ID NO: 112 - DNA, 16 bp, synthetic construct
  source 1..16: mol_type = other DNA
atcctacgatcttcac

SEQ ID NO: 113 - DNA, 16 bp, synthetic construct
  source 1..16: mol_type = other DNA
gggtatcaatctttcc

SEQ ID NO: 114 - DNA, 16 bp, synthetic construct
  source 1..16: mol_type = other DNA
tagggattacagagtt

SEQ ID NO: 115 - DNA, 16 bp, synthetic construct
  source 1..16: mol_type = other DNA
cttagttactgccttt

SEQ ID NO: 116 - DNA, 16 bp, synthetic construct
  source 1..16: mol_type = other DNA
gacagataacttgctt

SEQ ID NO: 117 - DNA, 16 bp, synthetic construct
  source 1..16: mol_type = other DNA
tagatatagactgtgg

SEQ ID NO: 118 - DNA, 16 bp, synthetic construct
  source 1..16: mol_type = other DNA
gtatttcaacactact

SEQ ID NO: 119 - DNA, 16 bp, synthetic construct
  source 1..16: mol_type = other DNA
aatattagtgactcat

SEQ ID NO: 120 - DNA, 16 bp, synthetic construct
  source 1..16: mol_type = other DNA
gtatactgaagcttca

SEQ ID NO: 121 - DNA, 16 bp, synthetic construct
  source 1..16: mol_type = other DNA
tgaattgggcaacagg

SEQ ID NO: 122 - DNA, 16 bp, synthetic construct
  source 1..16: mol_type = other DNA
attaggataacagttg

SEQ ID NO: 123 - DNA, 16 bp, synthetic construct
  source 1..16: mol_type = other DNA
gttagtaagacaatgg

SEQ ID NO: 124 - DNA, 16 bp, synthetic construct
  source 1..16: mol_type = other DNA
tgctataagactggtg

SEQ ID NO: 125 - DNA, 16 bp, synthetic construct
  source 1..16: mol_type = other DNA
tctctattgctatcaa

SEQ ID NO: 126 - DNA, 16 bp, synthetic construct
  source 1..16: mol_type = other DNA
gatatgcaatctacac

SEQ ID NO: 127 - DNA, 16 bp, synthetic construct
  source 1..16: mol_type = other DNA
gttactaagactgcac

SEQ ID NO: 128 - DNA, 16 bp, synthetic construct
  source 1..16: mol_type = other DNA
agtttaaacctggtcc

SEQ ID NO: 129 - DNA, 16 bp, synthetic construct
  source 1..16: mol_type = other DNA
acctatttacactcta

SEQ ID NO: 130 - DNA, 16 bp, synthetic construct
  source 1..16: mol_type = other DNA
accaacacattactgc

SEQ ID NO: 131 - DNA, 16 bp, synthetic construct
  source 1..16: mol_type = other DNA
cactttactgtcccct

SEQ ID NO: 132 - DNA, 16 bp, synthetic construct
  source 1..16: mol_type = other DNA
gatatggatcccctca

SEQ ID NO: 133 - DNA, 16 bp, synthetic construct
  source 1..16: mol_type = other DNA
tcagtcggagctctct

SEQ ID NO: 134 - DNA, 16 bp, synthetic construct
  source 1..16: mol_type = other DNA
gaattgaagttagggt

SEQ ID NO: 135 - DNA, 16 bp, synthetic construct
  source 1..16: mol_type = other DNA
agacttatttatggcg

SEQ ID NO: 136 - DNA, 16 bp, synthetic construct
  source 1..16: mol_type = other DNA
gataccttgcctcagc

SEQ ID NO: 137 - DNA, 16 bp, synthetic construct
  source 1..16: mol_type = other DNA
ataaattctccgctag

SEQ ID NO: 138 - DNA, 16 bp, synthetic construct
  source 1..16: mol_type = other DNA
gatacaaattatcgcc

SEQ ID NO: 139 - DNA, 16 bp, synthetic construct
  source 1..16: mol_type = other DNA
ccaattagtttgagcc

SEQ ID NO: 140 - DNA, 16 bp, synthetic construct
  source 1..16: mol_type = other DNA
tgttatagtaccgcca

SEQ ID NO: 141 - DNA, 16 bp, synthetic construct
  source 1..16: mol_type = other DNA
acatatcagatgactc

SEQ ID NO: 142 - DNA, 16 bp, synthetic construct
  source 1..16: mol_type = other DNA
aaattttgttgccgta

SEQ ID NO: 143 - DNA, 16 bp, synthetic construct
  source 1..16: mol_type = other DNA
gtcttctataaccact

SEQ ID NO: 144 - DNA, 16 bp, synthetic construct
  source 1..16: mol_type = other DNA
atctaactcaatctca

SEQ ID NO: 145 - DNA, 16 bp, synthetic construct
  source 1..16: mol_type = other DNA
accgcaaatctttccc

SEQ ID NO: 146 - DNA, 16 bp, synthetic construct
  source 1..16: mol_type = other DNA
gaacagtatccttcta

SEQ ID NO: 147 - DNA, 16 bp, synthetic construct
  source 1..16: mol_type = other DNA
gtatttaagattacca

SEQ ID NO: 148 - DNA, 16 bp, synthetic construct
  source 1..16: mol_type = other DNA
ggatttaagtcgggtc

SEQ ID NO: 149 - DNA, 16 bp, synthetic construct
  source 1..16: mol_type = other DNA
ctcgggttgattcttc

SEQ ID NO: 150 - DNA, 16 bp, synthetic construct
  source 1..16: mol_type = other DNA
attatcgaaccatctt

SEQ ID NO: 151 - DNA, 16 bp, synthetic construct
  source 1..16: mol_type = other DNA
attagtaagatcacta

SEQ ID NO: 152 - DNA, 16 bp, synthetic construct
  source 1..16: mol_type = other DNA
tacacaatttagctct

SEQ ID NO: 153 - DNA, 16 bp, synthetic construct
  source 1..16: mol_type = other DNA
agtgatatgaatggta

SEQ ID NO: 154 - DNA, 16 bp, synthetic construct
  source 1..16: mol_type = other DNA
cttattaagtttggac

SEQ ID NO: 155 - DNA, 16 bp, synthetic construct
  source 1..16: mol_type = other DNA
cattttaactcgggta

SEQ ID NO: 156 - DNA, 16 bp, synthetic construct
  source 1..16: mol_type = other DNA
acattaactgggatct

SEQ ID NO: 157 - DNA, 16 bp, synthetic construct
  source 1..16: mol_type = other DNA
ttgggattactttcca

SEQ ID NO: 158 - DNA, 16 bp, synthetic construct
  source 1..16: mol_type = other DNA
cttagaggaaggtgtt

SEQ ID NO: 159 - DNA, 16 bp, synthetic construct
  source 1..16: mol_type = other DNA
gggcacactgctagcc

SEQ ID NO: 160 - DNA, 16 bp, synthetic construct
  source 1..16: mol_type = other DNA
tccataacccagtcag

SEQ ID NO: 161 - DNA, 16 bp, synthetic construct
  source 1..16: mol_type = other DNA
gatcacccggaggcgc

SEQ ID NO: 162 - DNA, 16 bp, synthetic construct
  source 1..16: mol_type = other DNA
agcggtgacagggagg

SEQ ID NO: 163 - DNA, 16 bp, synthetic construct
  source 1..16: mol_type = other DNA
ccctgtgaagttgttc

SEQ ID NO: 164 - DNA, 16 bp, synthetic construct
  source 1..16: mol_type = other DNA
agttataatacggcag

SEQ ID NO: 165 - DNA, 16 bp, synthetic construct
  source 1..16: mol_type = other DNA
catgttgagatacgga

SEQ ID NO: 166 - DNA, 16 bp, synthetic construct
  source 1..16: mol_type = other DNA
agtaatatgtcagtgg

SEQ ID NO: 167 - DNA, 16 bp, synthetic construct
  source 1..16: mol_type = other DNA
gaatttatcatatcgg

SEQ ID NO: 168 - DNA, 16 bp, synthetic construct
  source 1..16: mol_type = other DNA
acagaacctgattgga

SEQ ID NO: 169 - DNA, 16 bp, synthetic construct
  source 1..16: mol_type = other DNA
gtattaatgaagggca

SEQ ID NO: 170 - DNA, 16 bp, synthetic construct
  source 1..16: mol_type = other DNA
agttataataaggtgt

SEQ ID NO: 171 - DNA, 16 bp, synthetic construct
  source 1..16: mol_type = other DNA
gtcataatatggatag

SEQ ID NO: 172 - DNA, 16 bp, synthetic construct
  source 1..16: mol_type = other DNA
aacgggtatgtagagc

SEQ ID NO: 173 - DNA, 16 bp, synthetic construct
  source 1..16: mol_type = other DNA
gcaataaagtagtgct

SEQ ID NO: 174 - DNA, 16 bp, synthetic construct
  source 1..16: mol_type = other DNA
aatattagctgtacca

SEQ ID NO: 175 - DNA, 16 bp, synthetic construct
  source 1..16: mol_type = other DNA
acatataagttgcaca

SEQ ID NO: 176 - DNA, 16 bp, synthetic construct
  source 1..16: mol_type = other DNA
tccgtatatccaggcc

SEQ ID NO: 177 - DNA, 16 bp, synthetic construct
  source 1..16: mol_type = other DNA
tctgtaacactgtcga

SEQ ID NO: 178 - DNA, 16 bp, synthetic construct
  source 1..16: mol_type = other DNA
ccagttaacagcgcgg

SEQ ID NO: 179 - DNA, 16 bp, synthetic construct
  source 1..16: mol_type = other DNA
agctatcaggctctga

SEQ ID NO: 180 - DNA, 16 bp, synthetic construct
  source 1..16: mol_type = other DNA
atcacgatgccaccat

SEQ ID NO: 181 - DNA, 16 bp, synthetic construct
  source 1..16: mol_type = other DNA
tctattggagaagtgt

SEQ ID NO: 182 - DNA, 16 bp, synthetic construct
  source 1..16: mol_type = other DNA
agatcggtattaagaa

SEQ ID NO: 183 - DNA, 16 bp, synthetic construct
  source 1..16: mol_type = other DNA
gttagtagtacttcca

SEQ ID NO: 184 - DNA, 16 bp, synthetic construct
  source 1..16: mol_type = other DNA
gctcggtggtgatctg

SEQ ID NO: 185 - DNA, 16 bp, synthetic construct
  source 1..16: mol_type = other DNA
gtatccgggttcagcg

SEQ ID NO: 186 - DNA, 16 bp, synthetic construct
  source 1..16: mol_type = other DNA
tatattcacggattac

SEQ ID NO: 187 - DNA, 16 bp, synthetic construct
  source 1..16: mol_type = other DNA
atcacgatcccctcct

SEQ ID NO: 188 - DNA, 16 bp, synthetic construct
  source 1..16: mol_type = other DNA
gtatattaactccagc

SEQ ID NO: 189 - DNA, 16 bp, synthetic construct
  source 1..16: mol_type = other DNA
catattggagcaacta

SEQ ID NO: 190 - DNA, 16 bp, synthetic construct
  source 1..16: mol_type = other DNA
ctcaatcctacgatct

SEQ ID NO: 191 - DNA, 16 bp, synthetic construct
  source 1..16: mol_type = other DNA
gccgattattgccccc

SEQ ID NO: 192 - DNA, 16 bp, synthetic construct
  source 1..16: mol_type = other DNA
agtgatactattagtt

SEQ ID NO: 193 - DNA, 16 bp, synthetic construct
  source 1..16: mol_type = other DNA
gtaactatcctgtttg

SEQ ID NO: 194 - DNA, 16 bp, synthetic construct
  source 1..16: mol_type = other DNA
ttagattatcaggtag

SEQ ID NO: 195 - DNA, 16 bp, synthetic construct
  source 1..16: mol_type = other DNA
atagatatagactgtg

SEQ ID NO: 196 - DNA, 16 bp, synthetic construct
  source 1..16: mol_type = other DNA
tgctatagtggtgctg

SEQ ID NO: 197 - DNA, 16 bp, synthetic construct
  source 1..16: mol_type = other DNA
ggagttaatattagtg

SEQ ID NO: 198 - DNA, 16 bp, synthetic construct
  source 1..16: mol_type = other DNA
atgcgctaaagatgga

SEQ ID NO: 199 - DNA, 16 bp, synthetic construct
  source 1..16: mol_type = other DNA
taaagtaaggactctg

SEQ ID NO: 200 - DNA, 16 bp, synthetic construct
  source 1..16: mol_type = other DNA
tagattaggataacag

SEQ ID NO: 201 - DNA, 16 bp, synthetic construct
  source 1..16: mol_type = other DNA
aagctaaacttctgtg

SEQ ID NO: 202 - DNA, 16 bp, synthetic construct
  source 1..16: mol_type = other DNA
atgctataagactggt

SEQ ID NO: 203 - DNA, 16 bp, synthetic construct
  source 1..16: mol_type = other DNA
gatactgtaggtacaa

SEQ ID NO: 204 - DNA, 16 bp, synthetic construct
  source 1..16: mol_type = other DNA
actgatatgcaatcta

SEQ ID NO: 205 - DNA, 16 bp, synthetic construct
  source 1..16: mol_type = other DNA
gtacttaattcttccg

SEQ ID NO: 206 - DNA, 16 bp, synthetic construct
  source 1..16: mol_type = other DNA
aagtttaaacctggtc

SEQ ID NO: 207 - DNA, 16 bp, synthetic construct
  source 1..16: mol_type = other DNA
gttacctatttacact

SEQ ID NO: 208 - DNA, 16 bp, synthetic construct
  source 1..16: mol_type = other DNA
tgagactatagagtta

SEQ ID NO: 209 - DNA, 16 bp, synthetic construct
  source 1..16: mol_type = other DNA
ccactttactgtcccc

SEQ ID NO: 210 - DNA, 16 bp, synthetic construct
  source 1..16: mol_type = other DNA
aatttggtggtccaca

SEQ ID NO: 211 - DNA, 16 bp, synthetic construct
  source 1..16: mol_type = other DNA
cattttagttcggttc

SEQ ID NO: 212 - DNA, 16 bp, synthetic construct
  source 1..16: mol_type = other DNA
ggaattgaagttaggg

SEQ ID NO: 213 - DNA, 16 bp, synthetic construct
  source 1..16: mol_type = other DNA
gtccttaatcgagcct

SEQ ID NO: 214 - DNA, 16 bp, synthetic construct
  source 1..16: mol_type = other DNA
ctgctaagctagcact

SEQ ID NO: 215 - DNA, 16 bp, synthetic construct
  source 1..16: mol_type = other DNA
ggtaatcaaggctgac

SEQ ID NO: 216 - DNA, 16 bp, synthetic construct
  source 1..16: mol_type = other DNA
agatacaaattatcgc

SEQ ID NO: 217 - DNA, 16 bp, synthetic construct
  source 1..16: mol_type = other DNA
ggacatatggcaccag

SEQ ID NO: 218 - DNA, 16 bp, synthetic construct
  source 1..16: mol_type = other DNA
gtgttatagtaccgcc

SEQ ID NO: 219 - DNA, 16 bp, synthetic construct
  source 1..16: mol_type = other DNA
cttctatacatatcag

SEQ ID NO: 220 - DNA, 16 bp, synthetic construct
  source 1..16: mol_type = other DNA
tcaataaaaatacggt

SEQ ID NO: 221 - DNA, 16 bp, synthetic construct
  source 1..16: mol_type = other DNA
ctctactcttgttcat

SEQ ID NO: 222 - DNA, 16 bp, synthetic construct
  source 1..16: mol_type = other DNA
gattttaacttgcggg

SEQ ID NO: 223 - DNA, 16 bp, synthetic construct
  source 1..16: mol_type = other DNA
gatattagctcatgga

SEQ ID NO: 224 - DNA, 16 bp, synthetic construct
  source 1..16: mol_type = other DNA
atttttaaatgcggct

SEQ ID NO: 225 - DNA, 16 bp, synthetic construct
  source 1..16: mol_type = other DNA
attaacaaaggatcca

SEQ ID NO: 226 - DNA, 16 bp, synthetic construct
  source 1..16: mol_type = other DNA
gtaactaaagagctgg

SEQ ID NO: 227 - DNA, 16 bp, synthetic construct
  source 1..16: mol_type = other DNA
ctatttaatggttcct

SEQ ID NO: 228 - DNA, 16 bp, synthetic construct
  source 1..16: mol_type = other DNA
gtaattacaagtcacc

SEQ ID NO: 229 - DNA, 16 bp, synthetic construct
  source 1..16: mol_type = other DNA
gtattattgacctggt

SEQ ID NO: 230 - DNA, 16 bp, synthetic construct
  source 1..16: mol_type = other DNA
gaaattaaaagacggc

SEQ ID NO: 231 - DNA, 16 bp, synthetic construct
  source 1..16: mol_type = other DNA
gctcataccaaagtga

SEQ ID NO: 232 - DNA, 16 bp, synthetic construct
  source 1..16: mol_type = other DNA
gtaaatatgagcctcc

SEQ ID NO: 233 - DNA, 16 bp, synthetic construct
  source 1..16: mol_type = other DNA
tgatataagggtccta

SEQ ID NO: 234 - DNA, 16 bp, synthetic construct
  source 1..16: mol_type = other DNA
attcagcctaacaggc

SEQ ID NO: 235 - DNA, 16 bp, synthetic construct
  source 1..16: mol_type = other DNA
taagttgcttggccaa

SEQ ID NO: 236 - DNA, 16 bp, synthetic construct
  source 1..16: mol_type = other DNA
ttctcctaaccgctct

SEQ ID NO: 237 - DNA, 16 bp, synthetic construct
  source 1..16: mol_type = other DNA
ccacacgggcacactg

SEQ ID NO: 238 - DNA, 16 bp, synthetic construct
  source 1..16: mol_type = other DNA
gcccagcgacttccat

SEQ ID NO: 239 - DNA, 16 bp, synthetic construct
  source 1..16: mol_type = other DNA
gaaatgatcacccgga

SEQ ID NO: 240 - DNA, 16 bp, synthetic construct
  source 1..16: mol_type = other DNA
aacaacttctggagca

SEQ ID NO: 241 - DNA, 16 bp, synthetic construct
  source 1..16: mol_type = other DNA
caagatcaccctgtga

SEQ ID NO: 242 - DNA, 16 bp, synthetic construct
  source 1..16: mol_type = other DNA
gtaattagttaatctt

SEQ ID NO: 243 - DNA, 16 bp, synthetic construct
  source 1..16: mol_type = other DNA
gctgtagttcaactcc

SEQ ID NO: 244 - DNA, 16 bp, synthetic construct
  source 1..16: mol_type = other DNA
gatagtaaggatcagt

SEQ ID NO: 245 - DNA, 16 bp, synthetic construct
  source 1..16: mol_type = other DNA
cttatattgaatgagt

SEQ ID NO: 246 - DNA, 16 bp, synthetic construct
  source 1..16: mol_type = other DNA
gcagaacaaagacggc

SEQ ID NO: 247 - DNA, 16 bp, synthetic construct
  source 1..16: mol_type = other DNA
tctgggtttacttgta

SEQ ID NO: 248 - DNA, 16 bp, synthetic construct
  source 1..16: mol_type = other DNA
aggagtttagtgatgc

SEQ ID NO: 249 - DNA, 16 bp, synthetic construct
  source 1..16: mol_type = other DNA
gcagaatagttatcta

SEQ ID NO: 250 - DNA, 16 bp, synthetic construct
  source 1..16: mol_type = other DNA
gtaattacaaggctct

SEQ ID NO: 251 - DNA, 16 bp, synthetic construct
  source 1..16: mol_type = other DNA
ccatttaagttttcgg

SEQ ID NO: 252 - DNA, 16 bp, synthetic construct
  source 1..16: mol_type = other DNA
aatactaaggtttctc

SEQ ID NO: 253 - DNA, 16 bp, synthetic construct
  source 1..16: mol_type = other DNA
gattttactgaaccaa

SEQ ID NO: 254 - DNA, 16 bp, synthetic construct
  source 1..16: mol_type = other DNA
acaactaaggccagtg

SEQ ID NO: 255 - DNA, 16 bp, synthetic construct
  source 1..16: mol_type = other DNA
cctgtaatgttccgga

SEQ ID NO: 256 - DNA, 16 bp, synthetic construct
  source 1..16: mol_type = other DNA
cttcgatcacatcccc

SEQ ID NO: 257 - DNA, 16 bp, synthetic construct
  source 1..16: mol_type = other DNA
ctccgtatatccaggc

SEQ ID NO: 258 - DNA, 16 bp, synthetic construct
  source 1..16: mol_type = other DNA
ttctttaatgcgctgt

SEQ ID NO: 259 - DNA, 16 bp, synthetic construct
  source 1..16: mol_type = other DNA
ggagtcgctggcatca

SEQ ID NO: 260 - DNA, 16 bp, synthetic construct
  source 1..16: mol_type = other DNA
atctattggagaagtg

SEQ ID NO: 261 - DNA, 16 bp, synthetic construct
  source 1..16: mol_type = other DNA
gatttgcaatgaactc

SEQ ID NO: 262 - DNA, 16 bp, synthetic construct
  source 1..16: mol_type = other DNA
aatgggttagtagtac

SEQ ID NO: 263 - DNA, 16 bp, synthetic construct
  source 1..16: mol_type = other DNA
tccagatagtggtctt

SEQ ID NO: 264 - DNA, 16 bp, synthetic construct
  source 1..16: mol_type = other DNA
ggagaagtatccgggt

SEQ ID NO: 265 - DNA, 16 bp, synthetic construct
  source 1..16: mol_type = other DNA
attactaatgcaccgt

SEQ ID NO: 266 - DNA, 16 bp, synthetic construct
  source 1..16: mol_type = other DNA
tgaaatcacgatcccc

SEQ ID NO: 267 - DNA, 16 bp, synthetic construct
  source 1..16: mol_type = other DNA
cgtatattaactccag

SEQ ID NO: 268 - DNA, 16 bp, synthetic construct
  source 1..16: mol_type = other DNA
tcatattggagcaact

SEQ ID NO: 269 - DNA, 16 bp, synthetic construct
  source 1..16: mol_type = other DNA
aagctaatgtgcttcc

SEQ ID NO: 270 - DNA, 16 bp, synthetic construct
  source 1..16: mol_type = other DNA
gtaacaattcctgcag

SEQ ID NO: 271 - DNA, 16 bp, synthetic construct
  source 1..16: mol_type = other DNA
catagtaccttcaaca

SEQ ID NO: 272 - DNA, 16 bp, synthetic construct
  source 1..16: mol_type = other DNA
tctgatacatgggcca

SEQ ID NO: 273 - DNA, 16 bp, synthetic construct
  source 1..16: mol_type = other DNA
tttagattatcaggta

SEQ ID NO: 274 - DNA, 16 bp, synthetic construct
  source 1..16: mol_type = other DNA
acatagatatagactg

SEQ ID NO: 275 - DNA, 16 bp, synthetic construct
  source 1..16: mol_type = other DNA
gtgctatagtggtgct

SEQ ID NO: 276 - DNA, 16 bp, synthetic construct
  source 1..16: mol_type = other DNA
atctattagcctatcc

SEQ ID NO: 277 - DNA, 16 bp, synthetic construct
  source 1..16: mol_type = other DNA
agcataaactcttggc

SEQ ID NO: 278 - DNA, 16 bp, synthetic construct
  source 1..16: mol_type = other DNA
tcagaaatgcctacgg

SEQ ID NO: 279 - DNA, 16 bp, synthetic construct
  source 1..16: mol_type = other DNA
gcagtaagaggcctct

SEQ ID NO: 280 - DNA, 16 bp, synthetic construct
  source 1..16: mol_type = other DNA
cttaggatgccacttt

SEQ ID NO: 281 - DNA, 16 bp, synthetic construct
  source 1..16: mol_type = other DNA
aataatctatcacggg

SEQ ID NO: 282 - DNA, 16 bp, synthetic construct
  source 1..16: mol_type = other DNA
tctggatactgtaggt

SEQ ID NO: 283 - DNA, 16 bp, synthetic construct
  source 1..16: mol_type = other DNA
atgaggttgtacttgc

SEQ ID NO: 284 - DNA, 16 bp, synthetic construct
  source 1..16: mol_type = other DNA
tactttagtgcttgtg

SEQ ID NO: 285 - DNA, 16 bp, synthetic construct
  source 1..16: mol_type = other DNA
agctacaaagacacga

SEQ ID NO: 286 - DNA, 16 bp, synthetic construct
  source 1..16: mol_type = other DNA
ggaaatactctcgcaa

SEQ ID NO: 287 - DNA, 16 bp, synthetic construct
  source 1..16: mol_type = other DNA
agcaaccactttactg

SEQ ID NO: 288 - DNA, 16 bp, synthetic construct
  source 1..16: mol_type = other DNA
gctacggagagatgct

SEQ ID NO: 289 - DNA, 16 bp, synthetic construct
  source 1..16: mol_type = other DNA
gcattttagttcggtt

SEQ ID NO: 290 - DNA, 16 bp, synthetic construct
  source 1..16: mol_type = other DNA
ttatttatggcgaccg

SEQ ID NO: 291 - DNA, 16 bp, synthetic construct
  source 1..16: mol_type = other DNA
tgttatcaccactctc

SEQ ID NO: 292 - DNA, 16 bp, synthetic construct
  source 1..16: mol_type = other DNA
gcctttacctaacagc

SEQ ID NO: 293 - DNA, 16 bp, synthetic construct
  source 1..16: mol_type = other DNA
acaaattatcgccttt

SEQ ID NO: 294 - DNA, 16 bp, synthetic construct
  source 1..16: mol_type = other DNA
tattataataggctgg

SEQ ID NO: 295 - DNA, 16 bp, synthetic construct
  source 1..16: mol_type = other DNA
ctgctaatgccgacag

SEQ ID NO: 296 - DNA, 16 bp, synthetic construct
  source 1..16: mol_type = other DNA
aacaggtttccagtac

SEQ ID NO: 297 - DNA, 16 bp, synthetic construct
  source 1..16: mol_type = other DNA
ctctatatatcacagc

SEQ ID NO: 298 - DNA, 16 bp, synthetic construct
  source 1..16: mol_type = other DNA
tgcacataacttcact

SEQ ID NO: 299 - DNA, 16 bp, synthetic construct
  source 1..16: mol_type = other DNA
cttatttaggccctca

SEQ ID NO: 300 - DNA, 16 bp, synthetic construct
  source 1..16: mol_type = other DNA
ataagtaaagtgtctg

SEQ ID NO: 301 - DNA, 16 bp, synthetic construct
  source 1..16: mol_type = other DNA
ctttttaagtaccgcg

SEQ ID NO: 302 - DNA, 16 bp, synthetic construct
  source 1..16: mol_type = other DNA
gtaatttagccccagt

SEQ ID NO: 303 - DNA, 16 bp, synthetic construct
  source 1..16: mol_type = other DNA
tatatttagttggtag

SEQ ID NO: 304 - DNA, 16 bp, synthetic construct
  source 1..16: mol_type = other DNA
gtaacgaattattacg

SEQ ID NO: 305 - DNA, 16 bp, synthetic construct
  source 1..16: mol_type = other DNA
attaacataagactgt

SEQ ID NO: 306 - DNA, 16 bp, synthetic construct
  source 1..16: mol_type = other DNA
gatattagagccagtt

SEQ ID NO: 307 - DNA, 16 bp, synthetic construct
  source 1..16: mol_type = other DNA
ttaagtaaatctaggc

SEQ ID NO: 308 - DNA, 16 bp, synthetic construct
  source 1..16: mol_type = other DNA
attattagtatgtcca

SEQ ID NO: 309 - DNA, 16 bp, synthetic construct
  source 1..16: mol_type = other DNA
tatattagtgacagtc

SEQ ID NO: 310 - DNA, 16 bp, synthetic construct
  source 1..16: mol_type = other DNA
ttatttaatatacggt

SEQ ID NO: 311 - DNA, 16 bp, synthetic construct
  source 1..16: mol_type = other DNA
gatttttaggttccgt

SEQ ID NO: 312 - DNA, 16 bp, synthetic construct
  source 1..16: mol_type = other DNA
catgacattcagccta

SEQ ID NO: 313 - DNA, 16 bp, synthetic construct
  source 1..16: mol_type = other DNA
catgccgtacctgaga

SEQ ID NO: 314 - DNA, 16 bp, synthetic construct
  source 1..16: mol_type = other DNA
cttaacacacctcatc

SEQ ID NO: 315 - DNA, 16 bp, synthetic construct
  source 1..16: mol_type = other DNA
acaactagtgcattcc

SEQ ID NO: 316 - DNA, 16 bp, synthetic construct
  source 1..16: mol_type = other DNA
gcttagagcccagcga

SEQ ID NO: 317 - DNA, 16 bp, synthetic construct
  source 1..16: mol_type = other DNA
gcctaaaccgaaaacc

SEQ ID NO: 318 - DNA, 16 bp, synthetic construct
  source 1..16: mol_type = other DNA
ggaagttagaacatga

SEQ ID NO: 319 - DNA, 16 bp, synthetic construct
  source 1..16: mol_type = other DNA
ccttacaagatcaccc

SEQ ID NO: 320 - DNA, 16 bp, synthetic construct
  source 1..16: mol_type = other DNA
catagaagtaatcttc

SEQ ID NO: 321 - DNA, 16 bp, synthetic construct
  source 1..16: mol_type = other DNA
acattcagtaagagtt

SEQ ID NO: 322 - DNA, 16 bp, synthetic construct
  source 1..16: mol_type = other DNA
attacgaagttctctg

SEQ ID NO: 323 - DNA, 16 bp, synthetic construct
  source 1..16: mol_type = other DNA
gtaatattgagatcac

SEQ ID NO: 324 - DNA, 16 bp, synthetic construct
  source 1..16: mol_type = other DNA
gtaatattgcaatccc

SEQ ID NO: 325 - DNA, 16 bp, synthetic construct
  source 1..16: mol_type = other DNA
tttaccaagagtccag

SEQ ID NO: 326 - DNA, 16 bp, synthetic construct
  source 1..16: mol_type = other DNA
caaattacttctccga

SEQ ID NO: 327 - DNA, 16 bp, synthetic construct
  source 1..16: mol_type = other DNA
gtatttagttggtgtg

SEQ ID NO: 328 - DNA, 16 bp, synthetic construct
  source 1..16: mol_type = other DNA
ttatcgataatttcct

SEQ ID NO: 329 - DNA, 16 bp, synthetic construct
  source 1..16: mol_type = other DNA
atcgctaaacatccta

SEQ ID NO: 330 - DNA, 16 bp, synthetic construct
  source 1..16: mol_type = other DNA
attaacttaggtgggc

SEQ ID NO: 331 - DNA, 16 bp, synthetic construct
  source 1..16: mol_type = other DNA
gataacttaccatccc

SEQ ID NO: 332 - DNA, 16 bp, synthetic construct
  source 1..16: mol_type = other DNA
tttaagtaaatctagg

SEQ ID NO: 333 - DNA, 16 bp, synthetic construct
  source 1..16: mol_type = other DNA
taagtaaatctaggca

SEQ ID NO: 334 - DNA, 16 bp, synthetic construct
  source 1..16: mol_type = other DNA
ttatacacaatttagc

SEQ ID NO: 335 - DNA, 16 bp, synthetic construct
  source 1..16: mol_type = other DNA
tatacacaatttagct

SEQ ID NO: 336 - DNA, 16 bp, synthetic construct
  source 1..16: mol_type = other DNA
ctgcttcgatcacatc

SEQ ID NO: 337 - DNA, 16 bp, synthetic construct
  source 1..16: mol_type = other DNA
atacacaatttagctc

SEQ ID NO: 338 - DNA, 16 bp, synthetic construct
  source 1..16: mol_type = other DNA
acacaatttagctctg

SEQ ID NO: 339 - DNA, 16 bp, synthetic construct
  source 1..16: mol_type = other DNA
cacaatttagctctgt

SEQ ID NO: 340 - DNA, 16 bp, synthetic construct
  source 1..16: mol_type = other DNA
acaatttagctctgtt

SEQ ID NO: 341 - DNA, 16 bp, synthetic construct
  source 1..16: mol_type = other DNA
acacaatttagctcta

SEQ ID NO: 342 - DNA, 16 bp, synthetic construct
  source 1..16: mol_type = other DNA
cacaatttagctctat

SEQ ID NO: 343 - DNA, 16 bp, synthetic construct
  source 1..16: mol_type = other DNA
acaatttagctctatt

SEQ ID NO: 344 - DNA, 16 bp, synthetic construct
  source 1..16: mol_type = other DNA
gcagaaattaaaagac

SEQ ID NO: 345 - DNA, 16 bp, synthetic construct
  source 1..16: mol_type = other DNA
cagaaattaaaagacg

SEQ ID NO: 346 - DNA, 16 bp, synthetic construct
  source 1..16: mol_type = other DNA
tctgtgttttacgact

SEQ ID NO: 347 - DNA, 16 bp, synthetic construct
  source 1..16: mol_type = other DNA
ccaccttctttaatgc

SEQ ID NO: 348 - DNA, 16 bp, synthetic construct
  source 1..16: mol_type = other DNA
taatgcgctgttgtat

SEQ ID NO: 349 - DNA, 16 bp, synthetic construct
  source 1..16: mol_type = other DNA
aaatatctattggaga

SEQ ID NO: 350 - DNA, 16 bp, synthetic construct
  source 1..16: mol_type = other DNA
tggagaagtgtattaa

SEQ ID NO: 351 - DNA, 16 bp, synthetic construct
  source 1..16: mol_type = other DNA
aaaatatctattggag

SEQ ID NO: 352 - DNA, 16 bp, synthetic construct
  source 1..16: mol_type = other DNA
ttggagaagtgtatta

SEQ ID NO: 353 - DNA, 16 bp, synthetic construct
  source 1..16: mol_type = other DNA
ttaagaagcattattg

SEQ ID NO: 354 - DNA, 16 bp, synthetic construct
  source 1..16: mol_type = other DNA
tgtagatcggtattaa

SEQ ID NO: 355 - DNA, 16 bp, synthetic construct
  source 1..16: mol_type = other DNA
tttcagatattagctc

SEQ ID NO: 356 - DNA, 16 bp, synthetic construct
  source 1..16: mol_type = other DNA
tagctcatggaaagca

SEQ ID NO: 357 - DNA, 16 bp, synthetic construct
  source 1..16: mol_type = other DNA
atcttctatttaatgg

SEQ ID NO: 358 - DNA, 16 bp, synthetic construct
  source 1..16: mol_type = other DNA
acgactggcagtgtcc

SEQ ID NO: 359 - DNA, 16 bp, synthetic construct
  source 1..16: mol_type = other DNA
caagggtattattgat

SEQ ID NO: 360 - DNA, 16 bp, synthetic construct
  source 1..16: mol_type = other DNA
attgataggcgagaac

SEQ ID NO: 361 - DNA, 16 bp, synthetic construct
  source 1..16: mol_type = other DNA
ctaaaattatcgaacc

SEQ ID NO: 362 - DNA, 16 bp, synthetic construct
  source 1..16: mol_type = other DNA
cgaaccatcttttgct

SEQ ID NO: 363 - DNA, 16 bp, synthetic construct
  source 1..16: mol_type = other DNA
cgtgtgtattattgac

SEQ ID NO: 364 - DNA, 16 bp, synthetic construct
  source 1..16: mol_type = other DNA
attgacctggtaaatt

SEQ ID NO: 365 - DNA, 16 bp, synthetic construct
  source 1..16: mol_type = other DNA
gagctgcttcgatcac

SEQ ID NO: 366 - DNA, 16 bp, synthetic construct
  source 1..16: mol_type = other DNA
aggatttaagtaaatc

SEQ ID NO: 367 - DNA, 16 bp, synthetic construct
  source 1..16: mol_type = other DNA
taaatctaggcaatag

SEQ ID NO: 368 - DNA, 16 bp, synthetic construct
  source 1..16: mol_type = other DNA
aatttagctctgttaa

SEQ ID NO: 369 - DNA, 16 bp, synthetic construct
  source 1..16: mol_type = other DNA
aatttagctctattaa

SEQ ID NO: 370 - DNA, 16 bp, synthetic construct
  source 1..16: mol_type = other DNA
gtgcagaaattaaaag

SEQ ID NO: 371 - DNA, 16 bp, synthetic construct
  source 1..16: mol_type = other DNA
taaaagacggcctctg

SEQ ID NO: 372 - DNA, 16 bp, synthetic construct
  source 1..16: mol_type = other DNA
taggtattattagtat

SEQ ID NO: 373 - DNA, 16 bp, synthetic construct
  source 1..16: mol_type = other DNA
tagtatgtccacctgg

SEQ ID NO: 374 - DNA, 16 bp, synthetic construct
  source 1..16: mol_type = other DNA
accaaagtgatatgaa

SEQ ID NO: 375 - DNA, 16 bp, synthetic construct
  source 1..16: mol_type = other DNA
tatgaatggtatgata

SEQ ID NO: 376 - DNA, 16 bp, synthetic construct
  source 1..16: mol_type = other DNA
tatgaatggtatgatg

SEQ ID NO: 377 - DNA, 16 bp, synthetic construct
  source 1..16: mol_type = other DNA
aatcttatattagtga

SEQ ID NO: 378 - DNA, 16 bp, synthetic construct
  source 1..16: mol_type = other DNA
tagtgacagtcagaac

SEQ ID NO: 379 - DNA, 16 bp, synthetic construct
  source 1..16: mol_type = other DNA
gatcacatccccctgg

SEQ ID NO: 380 - DNA, 16 bp, synthetic construct
  source 1..16: mol_type = other DNA
aaatctataggatgct

SEQ ID NO: 381 - DNA, 16 bp, synthetic construct
  source 1..16: mol_type = other DNA
gatgctgggtctctct

SEQ ID NO: 382 - DNA, 16 bp, synthetic construct
  source 1..16: mol_type = other DNA
tcagagaaggaaggta

SEQ ID NO: 383 - DNA, 16 bp, synthetic construct
  source 1..16: mol_type = other DNA
gggctcagagaaggaa

SEQ ID NO: 384 - DNA, 16 bp, synthetic construct
  source 1..16: mol_type = other DNA
ggctcagagaaggaag

SEQ ID NO: 385 - DNA, 16 bp, synthetic construct
  source 1..16: mol_type = other DNA
agaaggaaggtattca

SEQ ID NO: 386 - DNA, 16 bp, synthetic construct
  source 1..16: mol_type = other DNA
caggctgctattaaag

SEQ ID NO: 387 - DNA, 16 bp, synthetic construct
  source 1..16: mol_type = other DNA
gctattaaagacatgc

SEQ ID NO: 388 - DNA, 16 bp, synthetic construct
  source 1..16: mol_type = other DNA
tcaggctgctattaaa

SEQ ID NO: 389 - DNA, 16 bp, synthetic construct
  source 1..16: mol_type = other DNA
cagagaaggaaggtat

SEQ ID NO: 390 - DNA, 16 bp, synthetic construct
  source 1..16: mol_type = other DNA
ttctcaggctgctatt

SEQ ID NO: 391 - DNA, 16 bp, synthetic construct
  source 1..16: mol_type = other DNA
agagaaggaaggtatt

SEQ ID NO: 392 - DNA, 16 bp, synthetic construct
  source 1..16: mol_type = other DNA
gctcagagaaggaagg

SEQ ID NO: 393 - DNA, 16 bp, synthetic construct
  source 1..16: mol_type = other DNA
ggctgctattaaagac

SEQ ID NO: 394 - DNA, 16 bp, synthetic construct
  source 1..16: mol_type = other DNA
ccgggctcagagaagg

SEQ ID NO: 395 - DNA, 16 bp, synthetic construct
  source 1..16: mol_type = other DNA
ctcaggctgctattaa

SEQ ID NO: 396 - DNA, 16 bp, synthetic construct
  source 1..16: mol_type = other DNA
atattagtgacagtca

SEQ ID NO: 397 - DNA, 16 bp, synthetic construct
  source 1..16: mol_type = other DNA
aggatgctgggtctct

SEQ ID NO: 398 - DNA, 16 bp, synthetic construct
  source 1..16: mol_type = other DNA
attattgacctggtaa

SEQ ID NO: 399 - DNA, 16 bp, synthetic construct
  source 1..16: mol_type = other DNA
gaactgaaaaactaga

SEQ ID NO: 400 - DNA, 16 bp, synthetic construct
  source 1..16: mol_type = other DNA
accttattatcactaa

SEQ ID NO: 401 - DNA, 16 bp, synthetic construct
  source 1..16: mol_type = other DNA
taaaagcagagataag

SEQ ID NO: 402 - DNA, 16 bp, synthetic construct
  source 1..16: mol_type = other DNA
gatactttcagatatt

SEQ ID NO: 403 - DNA, 16 bp, synthetic construct
  source 1..16: mol_type = other DNA
cagatatccattcttc

SEQ ID NO: 404 - DNA, 16 bp, synthetic construct
  source 1..16: mol_type = other DNA
caaaatagatttaagt

SEQ ID NO: 405 - DNA, 16 bp, synthetic construct
  source 1..16: mol_type = other DNA
accaatattaatgtca

SEQ ID NO: 406 - DNA, 16 bp, synthetic construct
  source 1..16: mol_type = other DNA
acctttcaaatgtact

SEQ ID NO: 407 - DNA, 16 bp, synthetic construct
  source 1..16: mol_type = other DNA
gaccattatatatgtg

SEQ ID NO: 408 - DNA, 16 bp, synthetic construct
  source 1..16: mol_type = other DNA
tagtatacagtcccta

SEQ ID NO: 409 - DNA, 16 bp, synthetic construct
  source 1..16: mol_type = other DNA
caatattgtgtgtctc

SEQ ID NO: 410 - DNA, 16 bp, synthetic construct
  source 1..16: mol_type = other DNA
gatatataccaagtgg

SEQ ID NO: 411 - DNA, 16 bp, synthetic construct
  source 1..16: mol_type = other DNA
gcagaaggctgcccac

SEQ ID NO: 412 - DNA, 16 bp, synthetic construct
  source 1..16: mol_type = other DNA
tatagttcatcggatt

SEQ ID NO: 413 - DNA, 16 bp, synthetic construct
  source 1..16: mol_type = other DNA
acctaactcactgtca

SEQ ID NO: 414 - DNA, 16 bp, synthetic construct
  source 1..16: mol_type = other DNA
agttattatatggctg

SEQ ID NO: 415 - DNA, 16 bp, synthetic construct
  source 1..16: mol_type = other DNA
gacgataattctgtca

SEQ ID NO: 416 - DNA, 16 bp, synthetic construct
  source 1..16: mol_type = other DNA
gacaatacaaaccact

SEQ ID NO: 417 - DNA, 16 bp, synthetic construct
  source 1..16: mol_type = other DNA
gataatgtgaagctta

SEQ ID NO: 418 - DNA, 16 bp, synthetic construct
  source 1..16: mol_type = other DNA
gtaataaagcctccca

SEQ ID NO: 419 - DNA, 16 bp, synthetic construct
  source 1..16: mol_type = other DNA
aggtagaaagatttcc

SEQ ID NO: 420 - DNA, 16 bp, synthetic construct
  source 1..16: mol_type = other DNA
gactagaatgaagtaa

SEQ ID NO: 421 - DNA, 16 bp, synthetic construct
  source 1..16: mol_type = other DNA
aaagattctatctcag

SEQ ID NO: 422 - DNA, 16 bp, synthetic construct
  source 1..16: mol_type = other DNA
tcaaattcttacgaca

SEQ ID NO: 423 - DNA, 16 bp, synthetic construct
  source 1..16: mol_type = other DNA
gtccaaaatggtttca

SEQ ID NO: 424 - DNA, 16 bp, synthetic construct
  source 1..16: mol_type = other DNA
acataccagatcatgt

SEQ ID NO: 425 - DNA, 16 bp, synthetic construct
  source 1..16: mol_type = other DNA
cctagaaaagtcatct

SEQ ID NO: 426 - DNA, 16 bp, synthetic construct
  source 1..16: mol_type = other DNA
tctaattttggagcca

SEQ ID NO: 427 - DNA, 16 bp, synthetic construct
  source 1..16: mol_type = other DNA
gacaaacatactctta

SEQ ID NO: 428 - DNA, 16 bp, synthetic construct
  source 1..16: mol_type = other DNA
atgtatgaagaagggt

SEQ ID NO: 429 - DNA, 16 bp, synthetic construct
  source 1..16: mol_type = other DNA
acattaggtgggctgg

SEQ ID NO: 430 - DNA, 16 bp, synthetic construct
  source 1..16: mol_type = other DNA
gtatcaaagtacactt

SEQ ID NO: 431 - DNA, 16 bp, synthetic construct
  source 1..16: mol_type = other DNA
cctgaatatgacagag

SEQ ID NO: 432 - DNA, 16 bp, synthetic construct
  source 1..16: mol_type = other DNA
gaagtttaaatacctc

SEQ ID NO: 433 - DNA, 16 bp, synthetic construct
  source 1..16: mol_type = other DNA
attatttagagacttc

SEQ ID NO: 434 - DNA, 16 bp, synthetic construct
  source 1..16: mol_type = other DNA
cttaacattacatggc

SEQ ID NO: 435 - DNA, 16 bp, synthetic construct
  source 1..16: mol_type = other DNA
actaattggatggctt

SEQ ID NO: 436 - DNA, 16 bp, synthetic construct
  source 1..16: mol_type = other DNA
tcacaactagattcaa

SEQ ID NO: 437 - DNA, 16 bp, synthetic construct
  source 1..16: mol_type = other DNA
actgattgaattcttc

SEQ ID NO: 438 - DNA, 16 bp, synthetic construct
  source 1..16: mol_type = other DNA
aattacctaaaggtca

SEQ ID NO: 439 - DNA, 16 bp, synthetic construct
  source 1..16: mol_type = other DNA
agggattgaattgtca

SEQ ID NO: 440 - DNA, 16 bp, synthetic construct
  source 1..16: mol_type = other DNA
gcaatatattgatttg

SEQ ID NO: 441 - DNA, 16 bp, synthetic construct
  source 1..16: mol_type = other DNA
gtaatattaaagccag

SEQ ID NO: 442 - DNA, 16 bp, synthetic construct
  source 1..16: mol_type = other DNA
cactatagtgtcttct

SEQ ID NO: 443 - DNA, 16 bp, synthetic construct
  source 1..16: mol_type = other DNA
gaacctagcacacttt

SEQ ID NO: 444 - DNA, 16 bp, synthetic construct
  source 1..16: mol_type = other DNA
gattttaagagtccac

SEQ ID NO: 445 - DNA, 16 bp, synthetic construct
  source 1..16: mol_type = other DNA
agcaaatcatgtgttg

SEQ ID NO: 446 - DNA, 16 bp, synthetic construct
  source 1..16: mol_type = other DNA
cttctaaatagagtaa

SEQ ID NO: 447 - DNA, 16 bp, synthetic construct
  source 1..16: mol_type = other DNA
aaggtttgaccgtggc

SEQ ID NO: 448 - DNA, 16 bp, synthetic construct
  source 1..16: mol_type = other DNA
gtgtatataagttttg

SEQ ID NO: 449 - DNA, 16 bp, synthetic construct
  source 1..16: mol_type = other DNA
gaattgataacaggta

SEQ ID NO: 450 - DNA, 16 bp, synthetic construct
  source 1..16: mol_type = other DNA
gtctattaactgtgga

SEQ ID NO: 451 - DNA, 16 bp, synthetic construct
  source 1..16: mol_type = other DNA
ccctattaaatgttcc

SEQ ID NO: 452 - DNA, 16 bp, synthetic construct
  source 1..16: mol_type = other DNA
attaagtagtcatctg

SEQ ID NO: 453 - DNA, 16 bp, synthetic construct
  source 1..16: mol_type = other DNA
gaaatactatgttcac

SEQ ID NO: 454 - DNA, 16 bp, synthetic construct
  source 1..16: mol_type = other DNA
accatatggagtttct

SEQ ID NO: 455 - DNA, 16 bp, synthetic construct
  source 1..16: mol_type = other DNA
ggtaatttatgagtta

SEQ ID NO: 456 - DNA, 16 bp, synthetic construct
  source 1..16: mol_type = other DNA
gcaaattctgttttga

SEQ ID NO: 457 - DNA, 16 bp, synthetic construct
  source 1..16: mol_type = other DNA
aaatacagtgtactca

SEQ ID NO: 458 - DNA, 16 bp, synthetic construct
  source 1..16: mol_type = other DNA
gtcacataaagtaggg

SEQ ID NO: 459 - DNA, 16 bp, synthetic construct
  source 1..16: mol_type = other DNA
aaggtaaacttttctc

SEQ ID NO: 460 - DNA, 16 bp, synthetic construct
  source 1..16: mol_type = other DNA
tccttatacacctaag

SEQ ID NO: 461 - DNA, 16 bp, synthetic construct
  source 1..16: mol_type = other DNA
ccaaaatttcagtgct

SEQ ID NO: 462 - DNA, 16 bp, synthetic construct
  source 1..16: mol_type = other DNA
gaaatacctgagtgac

SEQ ID NO: 463 - DNA, 16 bp, synthetic construct
  source 1..16: mol_type = other DNA
tttaattagacactgc

SEQ ID NO: 464 - DNA, 16 bp, synthetic construct
  source 1..16: mol_type = other DNA
taccattcaatgtata

SEQ ID NO: 465 - DNA, 16 bp, synthetic construct
  source 1..16: mol_type = other DNA
ggtaaagaaatgttcc

SEQ ID NO: 466 - DNA, 16 bp, synthetic construct
  source 1..16: mol_type = other DNA
tctaattcactggaac

SEQ ID NO: 467 - DNA, 16 bp, synthetic construct
  source 1..16: mol_type = other DNA
aatataccaaacatgc

SEQ ID NO: 468 - DNA, 16 bp, synthetic construct
  source 1..16: mol_type = other DNA
ttccaatattgtggcc

SEQ ID NO: 469 - DNA, 16 bp, synthetic construct
  source 1..16: mol_type = other DNA
tccaagaactgaccac

SEQ ID NO: 470 - DNA, 16 bp, synthetic construct
  source 1..16: mol_type = other DNA
ggactaattacaacaa

SEQ ID NO: 471 - DNA, 16 bp, synthetic construct
  source 1..16: mol_type = other DNA
ttactaaaactacagt

SEQ ID NO: 472 - DNA, 16 bp, synthetic construct
  source 1..16: mol_type = other DNA
taccactatatatact

SEQ ID NO: 473 - DNA, 16 bp, synthetic construct
  source 1..16: mol_type = other DNA
ttatattagtgacagt

SEQ ID NO: 474 - DNA, 16 bp, synthetic construct
  source 1..16: mol_type = other DNA
taggatgctgggtctc

SEQ ID NO: 475 - DNA, 16 bp, synthetic construct
  source 1..16: mol_type = other DNA
ttacgactggcagtgt

SEQ ID NO: 476 - DNA, 16 bp, synthetic construct
  source 1..16: mol_type = other DNA
tattattgacctggta

SEQ ID NO: 477 - DNA, 16 bp, synthetic construct
  source 1..16: mol_type = other DNA
caagagagaatgcttt

SEQ ID NO: 478 - DNA, 16 bp, synthetic construct
  source 1..16: mol_type = other DNA
tttgaacataaaagca

SEQ ID NO: 479 - DNA, 16 bp, synthetic construct
  source 1..16: mol_type = other DNA
gcttttcactgttgga

SEQ ID NO: 480 - DNA, 16 bp, synthetic construct
  source 1..16: mol_type = other DNA
taataatatctgtact

SEQ ID NO: 481 - DNA, 16 bp, synthetic construct
  source 1..16: mol_type = other DNA
ctgaaatagacaacaa

SEQ ID NO: 482 - DNA, 16 bp, synthetic construct
  source 1..16: mol_type = other DNA
tacctttcaaatgtac

SEQ ID NO: 483 - DNA, 16 bp, synthetic construct
  source 1..16: mol_type = other DNA
atggtatgatggttct

SEQ ID NO: 484 - DNA, 16 bp, synthetic construct
  source 1..16: mol_type = other DNA
tccaaattttaccatc

SEQ ID NO: 485 - DNA, 16 bp, synthetic construct
  source 1..16: mol_type = other DNA
attaatttgcttgggt

SEQ ID NO: 486 - DNA, 16 bp, synthetic construct
  source 1..16: mol_type = other DNA
gcactaagggtcttat

SEQ ID NO: 487 - DNA, 16 bp, synthetic construct
  source 1..16: mol_type = other DNA
catttaagtgaagtct

SEQ ID NO: 488 - DNA, 16 bp, synthetic construct
  source 1..16: mol_type = other DNA
aggtaatttatgagtt

SEQ ID NO: 489 - DNA, 16 bp, synthetic construct
  source 1..16: mol_type = other DNA
tttactggacagatga

SEQ ID NO: 490 - DNA, 16 bp, synthetic construct
  source 1..16: mol_type = other DNA
cttactagtatacagt

SEQ ID NO: 491 - DNA, 16 bp, synthetic construct
  source 1..16: mol_type = other DNA
atttatagacaagggc

SEQ ID NO: 492 - DNA, 16 bp, synthetic construct
  source 1..16: mol_type = other DNA
ccacaatcatggtgtt

SEQ ID NO: 493 - DNA, 16 bp, synthetic construct
  source 1..16: mol_type = other DNA
tcaatatcaatggcag

SEQ ID NO: 494 - DNA, 16 bp, synthetic construct
  source 1..16: mol_type = other DNA
gatattttatttgtcc

SEQ ID NO: 495 - DNA, 16 bp, synthetic construct
  source 1..16: mol_type = other DNA
ctatttacacccttca

SEQ ID NO: 496 - DNA, 16 bp, synthetic construct
  source 1..16: mol_type = other DNA
gaaatacagtgtactc

SEQ ID NO: 497 - DNA, 16 bp, synthetic construct
  source 1..16: mol_type = other DNA
aatattactcttgaca

SEQ ID NO: 498 - DNA, 16 bp, synthetic construct
  source 1..16: mol_type = other DNA
gattacatggcaacac

SEQ ID NO: 499 - DNA, 16 bp, synthetic construct
  source 1..16: mol_type = other DNA
accaaacacatgatcc

SEQ ID NO: 500 - DNA, 16 bp, synthetic construct
  source 1..16: mol_type = other DNA
gaatctagtctcagtg

SEQ ID NO: 501 - DNA, 16 bp, synthetic construct
  source 1..16: mol_type = other DNA
tgtaatacagaatctc

SEQ ID NO: 502 - DNA, 16 bp, synthetic construct
  source 1..16: mol_type = other DNA
atatttccaaccagta

SEQ ID NO: 503 - DNA, 16 bp, synthetic construct
  source 1..16: mol_type = other DNA
atgacctagaaaagtc

SEQ ID NO: 504 - DNA, 16 bp, synthetic construct
  source 1..16: mol_type = other DNA
caggtatcaaagtaca

SEQ ID NO: 505 - DNA, 16 bp, synthetic construct
  source 1..16: mol_type = other DNA
gccaaagtaattccat

SEQ ID NO: 506 - DNA, 16 bp, synthetic construct
  source 1..16: mol_type = other DNA
gtctaaggtaaacttt

SEQ ID NO: 507 - DNA, 16 bp, synthetic construct
  source 1..16: mol_type = other DNA
gtaataattaactacc

SEQ ID NO: 508 - DNA, 16 bp, synthetic construct
  source 1..16: mol_type = other DNA
gtaaagattctatctc

SEQ ID NO: 509 - DNA, 16 bp, synthetic construct
  source 1..16: mol_type = other DNA
gaaactttggttgaga

SEQ ID NO: 510 - DNA, 16 bp, synthetic construct
  source 1..16: mol_type = other DNA
ttctaattttggagcc

SEQ ID NO: 511 - DNA, 16 bp, synthetic construct
  source 1..16: mol_type = other DNA
tatcatatatgttgca

SEQ ID NO: 512 - DNA, 16 bp, synthetic construct
  source 1..16: mol_type = other DNA
caagtttacaacccaa

SEQ ID NO: 513 - DNA, 16 bp, synthetic construct
  source 1..16: mol_type = other DNA
tacataccagatcatg

SEQ ID NO: 514 - DNA, 16 bp, synthetic construct
  source 1..16: mol_type = other DNA
ctgtattaatagattc

SEQ ID NO: 515 - DNA, 16 bp, synthetic construct
  source 1..16: mol_type = other DNA
ggttatatattaagta

SEQ ID NO: 516 - DNA, 16 bp, synthetic construct
  source 1..16: mol_type = other DNA
aagataaacacaccta

SEQ ID NO: 517 - DNA, 16 bp, synthetic construct
  source 1..16: mol_type = other DNA
catatagtacacatga

SEQ ID NO: 518 - DNA, 16 bp, synthetic construct
  source 1..16: mol_type = other DNA
atcatatgaaagccaa

SEQ ID NO: 519 - DNA, 16 bp, synthetic construct
  source 1..16: mol_type = other DNA
aaccatatatgcctca

SEQ ID NO: 520 - DNA, 16 bp, synthetic construct
  source 1..16: mol_type = other DNA
gcaaatcacaagatga

SEQ ID NO: 521 - DNA, 16 bp, synthetic construct
  source 1..16: mol_type = other DNA
cagaattgataacagg

SEQ ID NO: 522 - DNA, 16 bp, synthetic construct
  source 1..16: mol_type = other DNA
atttatttaggcatcg

SEQ ID NO: 523 - DNA, 16 bp, synthetic construct
  source 1..16: mol_type = other DNA
cattatctatggcatt

SEQ ID NO: 524 - DNA, 16 bp, synthetic construct
  source 1..16: mol_type = other DNA
ccaattaagtcaatcc

SEQ ID NO: 525 - DNA, 16 bp, synthetic construct
  source 1..16: mol_type = other DNA
gatattccaaaagtca

SEQ ID NO: 526 - DNA, 16 bp, synthetic construct
  source 1..16: mol_type = other DNA
aaagaagtgttgtcca

SEQ ID NO: 527 - DNA, 16 bp, synthetic construct
  source 1..16: mol_type = other DNA
acttattcatcctagc

SEQ ID NO: 528 - DNA, 16 bp, synthetic construct
  source 1..16: mol_type = other DNA
gaagttttaagagtga

SEQ ID NO: 529 - DNA, 16 bp, synthetic construct
  source 1..16: mol_type = other DNA
ctattgaaggtctctg

SEQ ID NO: 530 - DNA, 16 bp, synthetic construct
  source 1..16: mol_type = other DNA
gaagttattatatggc

SEQ ID NO: 531 - DNA, 16 bp, synthetic construct
  source 1..16: mol_type = other DNA
gttttaagttatctca

SEQ ID NO: 532 - DNA, 16 bp, synthetic construct
  source 1..16: mol_type = other DNA
atgtaaaggtggttca

SEQ ID NO: 533 - DNA, 16 bp, synthetic construct
  source 1..16: mol_type = other DNA
tcaatattgtgtgtct

SEQ ID NO: 534 - DNA, 16 bp, synthetic construct
  source 1..16: mol_type = other DNA
accaatttcaacctga

SEQ ID NO: 535 - DNA, 16 bp, synthetic construct
  source 1..16: mol_type = other DNA
attaatttgtatccta

SEQ ID NO: 536 - DNA, 16 bp, synthetic construct
  source 1..16: mol_type = other DNA
taagatgatgctcctc

SEQ ID NO: 537 - DNA, 16 bp, synthetic construct
  source 1..16: mol_type = other DNA
acttagacactaccat

SEQ ID NO: 538 - DNA, 16 bp, synthetic construct
  source 1..16: mol_type = other DNA
ctcaaacacactcagt

SEQ ID NO: 539 - DNA, 16 bp, synthetic construct
  source 1..16: mol_type = other DNA
gaaatcaacaccctca

SEQ ID NO: 540 - DNA, 16 bp, synthetic construct
  source 1..16: mol_type = other DNA
tagcaaggtaccattc

SEQ ID NO: 541 - DNA, 16 bp, synthetic construct
  source 1..16: mol_type = other DNA
cttaaggtcttatgtt

SEQ ID NO: 542 - DNA, 16 bp, synthetic construct
  source 1..16: mol_type = other DNA
atgcaatgggccaatt

SEQ ID NO: 543 - DNA, 16 bp, synthetic construct
  source 1..16: mol_type = other DNA
tccaaaatttcagtgc

SEQ ID NO: 544 - DNA, 16 bp, synthetic construct
  source 1..16: mol_type = other DNA
gtttaattagacactg

SEQ ID NO: 545 - DNA, 16 bp, synthetic construct
  source 1..16: mol_type = other DNA
gctagaatttactaaa

SEQ ID NO: 546 - DNA, 16 bp, synthetic construct
  source 1..16: mol_type = other DNA
ctccaagaactgacca

SEQ ID NO: 547 - DNA, 16 bp, synthetic construct
  source 1..16: mol_type = other DNA
gaaaactttgaaggta

SEQ ID NO: 548 - DNA, 16 bp, synthetic construct
  source 1..16: mol_type = other DNA
atggactaattacaac

SEQ ID NO: 549 - DNA, 16 bp, synthetic construct
  source 1..16: mol_type = other DNA
acaataccactatata

SEQ ID NO: 550 - DNA, 16 bp, synthetic construct
  source 1..16: mol_type = other DNA
cttatattagtgacag

SEQ ID NO: 551 - DNA, 16 bp, synthetic construct
  source 1..16: mol_type = other DNA
ataggatgctgggtct

SEQ ID NO: 552 - DNA, 16 bp, synthetic construct
  source 1..16: mol_type = other DNA
tttacgactggcagtg

SEQ ID NO: 553 - DNA, 16 bp, synthetic construct
  source 1..16: mol_type = other DNA
tgtattattgacctgg

SEQ ID NO: 554 - DNA, 16 bp, synthetic construct
  source 1..16: mol_type = other DNA
ctctccaagaactgac

SEQ ID NO: 555 - DNA, 16 bp, synthetic construct
  source 1..16: mol_type = other DNA
acaagagagaatgctt

SEQ ID NO: 556 - DNA, 16 bp, synthetic construct
  source 1..16: mol_type = other DNA
atgtagagaatgggaa

SEQ ID NO: 557 - DNA, 16 bp, synthetic construct
  source 1..16: mol_type = other DNA
aagcatgaattcgctt

SEQ ID NO: 558 - DNA, 16 bp, synthetic construct
  source 1..16: mol_type = other DNA
atcaacagcataataa

SEQ ID NO: 559 - DNA, 16 bp, synthetic construct
  source 1..16: mol_type = other DNA
gaaatgactgaaatag

SEQ ID NO: 560 - DNA, 16 bp, synthetic construct
  source 1..16: mol_type = other DNA
tatttctaaagccaga

SEQ ID NO: 561 - DNA, 16 bp, synthetic construct
  source 1..16: mol_type = other DNA
ctcataccaaagtgat

SEQ ID NO: 562 - DNA, 16 bp, synthetic construct
  source 1..16: mol_type = other DNA
gcagaattgataacag

SEQ ID NO: 563 - DNA, 16 bp, synthetic construct
  source 1..16: mol_type = other DNA
agatatcaggtatcaa

SEQ ID NO: 564 - DNA, 16 bp, synthetic construct
  source 1..16: mol_type = other DNA
catttacaagttccct

SEQ ID NO: 565 - DNA, 16 bp, synthetic construct
  source 1..16: mol_type = other DNA
cttgattacatggcaa

SEQ ID NO: 566 - DNA, 16 bp, synthetic construct
  source 1..16: mol_type = other DNA
ccagtaaagattctat

SEQ ID NO: 567 - DNA, 16 bp, synthetic construct
  source 1..16: mol_type = other DNA
tcatatacaatgacca

SEQ ID NO: 568 - DNA, 16 bp, synthetic construct
  source 1..16: mol_type = other DNA
gcaatactgaagctaa

SEQ ID NO: 569 - DNA, 16 bp, synthetic construct
  source 1..16: mol_type = other DNA
gaagattcaagtccta

SEQ ID NO: 570 - DNA, 16 bp, synthetic construct
  source 1..16: mol_type = other DNA
cctattaatttgcttg

SEQ ID NO: 571 - DNA, 16 bp, synthetic construct
  source 1..16: mol_type = other DNA
aatttatagacaaggg

SEQ ID NO: 572 - DNA, 16 bp, synthetic construct
  source 1..16: mol_type = other DNA
ataaccaacagatccc

SEQ ID NO: 573 - DNA, 16 bp, synthetic construct
  source 1..16: mol_type = other DNA
aagaatatgtcagtgg

SEQ ID NO: 574 - DNA, 16 bp, synthetic construct
  source 1..16: mol_type = other DNA
gctcaaatttgtgtgc

SEQ ID NO: 575 - DNA, 16 bp, synthetic construct
  source 1..16: mol_type = other DNA
ggaaatacagtgtact

SEQ ID NO: 576 - DNA, 16 bp, synthetic construct
  source 1..16: mol_type = other DNA
gaagaatctcaaggag

SEQ ID NO: 577 - DNA, 16 bp, synthetic construct
  source 1..16: mol_type = other DNA
caaactatatactcta

SEQ ID NO: 578 - DNA, 16 bp, synthetic construct
  source 1..16: mol_type = other DNA
gcacatttatagcata

SEQ ID NO: 579 - DNA, 16 bp, synthetic construct
  source 1..16: mol_type = other DNA
taaattatactcaccc

SEQ ID NO: 580 - DNA, 16 bp, synthetic construct
  source 1..16: mol_type = other DNA
gactataaatggaagc

SEQ ID NO: 581 - DNA, 16 bp, synthetic construct
  source 1..16: mol_type = other DNA
gtttatactttccact

SEQ ID NO: 582 - DNA, 16 bp, synthetic construct
  source 1..16: mol_type = other DNA
cagaaactttggttga

SEQ ID NO: 583 - DNA, 16 bp, synthetic construct
  source 1..16: mol_type = other DNA
gataccaatttcaacc

SEQ ID NO: 584 - DNA, 16 bp, synthetic construct
  source 1..16: mol_type = other DNA
tggcataaactggacc

SEQ ID NO: 585 - DNA, 16 bp, synthetic construct
  source 1..16: mol_type = other DNA
gttcatatctttggat

SEQ ID NO: 586 - DNA, 16 bp, synthetic construct
  source 1..16: mol_type = other DNA
agtatatcgcacacat

SEQ ID NO: 587 - DNA, 16 bp, synthetic construct
  source 1..16: mol_type = other DNA
gaatctagaacactca

SEQ ID NO: 588 - DNA, 16 bp, synthetic construct
  source 1..16: mol_type = other DNA
aagtatggacacatgg

SEQ ID NO: 589 - DNA, 16 bp, synthetic construct
  source 1..16: mol_type = other DNA
aatatttccaaccagt

SEQ ID NO: 590 - DNA, 16 bp, synthetic construct
  source 1..16: mol_type = other DNA
gatacaagaggctgaa

SEQ ID NO: 591 - DNA, 16 bp, synthetic construct
  source 1..16: mol_type = other DNA
atgatagaggactgtt

SEQ ID NO: 592 - DNA, 16 bp, synthetic construct
  source 1..16: mol_type = other DNA
aatactgtagcaaggt

SEQ ID NO: 593 - DNA, 16 bp, synthetic construct
  source 1..16: mol_type = other DNA
gcagatagtaacctct

SEQ ID NO: 594 - DNA, 16 bp, synthetic construct
  source 1..16: mol_type = other DNA
gtctattaattcatgg

SEQ ID NO: 595 - DNA, 16 bp, synthetic construct
  source 1..16: mol_type = other DNA
gcaaagatgcttttcc

SEQ ID NO: 596 - DNA, 16 bp, synthetic construct
  source 1..16: mol_type = other DNA
aaagttttacagcaca

SEQ ID NO: 597 - DNA, 16 bp, synthetic construct
  source 1..16: mol_type = other DNA
tacttaattcctgtca

SEQ ID NO: 598 - DNA, 16 bp, synthetic construct
  source 1..16: mol_type = other DNA
agtataaagctatcct

SEQ ID NO: 599 - DNA, 16 bp, synthetic construct
  source 1..16: mol_type = other DNA
aatgtatagagctgtg

SEQ ID NO: 600 - DNA, 16 bp, synthetic construct
  source 1..16: mol_type = other DNA
tctattgaaggtctct

SEQ ID NO: 601 - DNA, 16 bp, synthetic construct
  source 1..16: mol_type = other DNA
ctctaattatcctttc

SEQ ID NO: 602 - DNA, 16 bp, synthetic construct
  source 1..16: mol_type = other DNA
catgatgataatattc

SEQ ID NO: 603 - DNA, 16 bp, synthetic construct
  source 1..16: mol_type = other DNA
atcatttaagtgaagt

SEQ ID NO: 604 - DNA, 16 bp, synthetic construct
  source 1..16: mol_type = other DNA
cacttactagtataca

SEQ ID NO: 605 - DNA, 16 bp, synthetic construct
  source 1..16: mol_type = other DNA
tctatactaaagactt

SEQ ID NO: 606 - DNA, 16 bp, synthetic construct
  source 1..16: mol_type = other DNA
catgtatgacctagaa

SEQ ID NO: 607 - DNA, 16 bp, synthetic construct
  source 1..16: mol_type = other DNA
ataatttactggacag

SEQ ID NO: 608 - DNA, 16 bp, synthetic construct
  source 1..16: mol_type = other DNA
gttactttaaaggtca

SEQ ID NO: 609 - DNA, 16 bp, synthetic construct
  source 1..16: mol_type = other DNA
ctcaatattgtgtgtc

SEQ ID NO: 610 - DNA, 16 bp, synthetic construct
  source 1..16: mol_type = other DNA
agaacattaagtccaa

SEQ ID NO: 611 - DNA, 16 bp, synthetic construct
  source 1..16: mol_type = other DNA
ctacataccagatcat

SEQ ID NO: 612 - DNA, 16 bp, synthetic construct
  source 1..16: mol_type = other DNA
taggtaatttatgagt

SEQ ID NO: 613 - DNA, 16 bp, synthetic construct
  source 1..16: mol_type = other DNA
atcttttaattggtac

SEQ ID NO: 614 - DNA, 16 bp, synthetic construct
  source 1..16: mol_type = other DNA
gaaacttcggctcact

SEQ ID NO: 615 - DNA, 16 bp, synthetic construct
  source 1..16: mol_type = other DNA
agaaatcaacaccctc

SEQ ID NO: 616 - DNA, 16 bp, synthetic construct
  source 1..16: mol_type = other DNA
taccattactgagatt

SEQ ID NO: 617 - DNA, 16 bp, synthetic construct
  source 1..16: mol_type = other DNA
ataaagaagtgttgtc

SEQ ID NO: 618 - DNA, 16 bp, synthetic construct
  source 1..16: mol_type = other DNA
agcataaagtcttatt

SEQ ID NO: 619 - DNA, 16 bp, synthetic construct
  source 1..16: mol_type = other DNA
agtttaattagacact

SEQ ID NO: 620 - DNA, 16 bp, synthetic construct
  source 1..16: mol_type = other DNA
acaattcaaactctct

SEQ ID NO: 621 - DNA, 16 bp, synthetic construct
  source 1..16: mol_type = other DNA
gctatattttttatgg

SEQ ID NO: 622 - DNA, 16 bp, synthetic construct
  source 1..16: mol_type = other DNA
ccagctagaatttact

SEQ ID NO: 623 - DNA, 16 bp, synthetic construct
  source 1..16: mol_type = other DNA
ctctatgaagacattc

SEQ ID NO: 624 - DNA, 16 bp, synthetic construct
  source 1..16: mol_type = other DNA
tcttaaggtcttatgt

SEQ ID NO: 625 - DNA, 16 bp, synthetic construct
  source 1..16: mol_type = other DNA
accacttagacactac

SEQ ID NO: 626 - DNA, 16 bp, synthetic construct
  source 1..16: mol_type = other DNA
gtggagaaaactttga

SEQ ID NO: 627 - DNA, 16 bp, synthetic construct
  source 1..16: mol_type = other DNA
tcttatattagtgaca

SEQ ID NO: 628 - DNA, 16 bp, synthetic construct
  source 1..16: mol_type = other DNA
ctataggatgctgggt

SEQ ID NO: 629 - DNA, 16 bp, synthetic construct
  source 1..16: mol_type = other DNA
ttttacgactggcagt

SEQ ID NO: 630 - DNA, 16 bp, synthetic construct
  source 1..16: mol_type = other DNA
gtgtattattgacctg

SEQ ID NO: 631 - DNA, 16 bp, synthetic construct
  source 1..16: mol_type = other DNA
agaatagcccatcacg

SEQ ID NO: 632 - DNA, 16 bp, synthetic construct
  source 1..16: mol_type = other DNA
tataaagaagtgttgt

SEQ ID NO: 633 - DNA, 16 bp, synthetic construct
  source 1..16: mol_type = other DNA
aagtgtattaaaactc

SEQ ID NO: 634 - DNA, 16 bp, synthetic construct
  source 1..16: mol_type = other DNA
ccatgtagagaatggg

SEQ ID NO: 635 - DNA, 16 bp, synthetic construct
  source 1..16: mol_type = other DNA
gaatgcttaaatcaac

SEQ ID NO: 636 - DNA, 16 bp, synthetic construct
  source 1..16: mol_type = other DNA
tatagactgcaatttc

SEQ ID NO: 637 - DNA, 16 bp, synthetic construct
  source 1..16: mol_type = other DNA
ctacagcttatcctgc

SEQ ID NO: 638 - DNA, 16 bp, synthetic construct
  source 1..16: mol_type = other DNA
ctgagatgaatatttc

SEQ ID NO: 639 - DNA, 16 bp, synthetic construct
  source 1..16: mol_type = other DNA
atagtatcagctcata

SEQ ID NO: 640 - DNA, 16 bp, synthetic construct
  source 1..16: mol_type = other DNA
cactagcagtgatctg

SEQ ID NO: 641 - DNA, 16 bp, synthetic construct
  source 1..16: mol_type = other DNA
attactggaatccaca

SEQ ID NO: 642 - DNA, 16 bp, synthetic construct
  source 1..16: mol_type = other DNA
gattttgaggctctct

SEQ ID NO: 643 - DNA, 16 bp, synthetic construct
  source 1..16: mol_type = other DNA
gctattagatttacac

SEQ ID NO: 644 - DNA, 16 bp, synthetic construct
  source 1..16: mol_type = other DNA
ttaatcacaatctcca

SEQ ID NO: 645 - DNA, 16 bp, synthetic construct
  source 1..16: mol_type = other DNA
acttttaacaaacagg

SEQ ID NO: 646 - DNA, 16 bp, synthetic construct
  source 1..16: mol_type = other DNA
acatatgacagagttc

SEQ ID NO: 647 - DNA, 16 bp, synthetic construct
  source 1..16: mol_type = other DNA
tgggatacaagaggct

SEQ ID NO: 648 - DNA, 16 bp, synthetic construct
  source 1..16: mol_type = other DNA
aatttagtatccttca

SEQ ID NO: 649 - DNA, 16 bp, synthetic construct
  source 1..16: mol_type = other DNA
taggattaaggagttc

SEQ ID NO: 650 - DNA, 16 bp, synthetic construct
  source 1..16: mol_type = other DNA
acagaatgataaccca

SEQ ID NO: 651 - DNA, 16 bp, synthetic construct
  source 1..16: mol_type = other DNA
gaaattatcttctgtc

SEQ ID NO: 652 - DNA, 16 bp, synthetic construct
  source 1..16: mol_type = other DNA
tctaatttagttctgc

SEQ ID NO: 653 - DNA, 16 bp, synthetic construct
  source 1..16: mol_type = other DNA
tataggtaatttatga

SEQ ID NO: 654 - DNA, 16 bp, synthetic construct
  source 1..16: mol_type = other DNA
aagtacaaatgagtca

SEQ ID NO: 655 - DNA, 16 bp, synthetic construct
  source 1..16: mol_type = other DNA
gttcatactttactgc

SEQ ID NO: 656 - DNA, 16 bp, synthetic construct
  source 1..16: mol_type = other DNA
ttctattgaaggtctc

SEQ ID NO: 657 - DNA, 16 bp, synthetic construct
  source 1..16: mol_type = other DNA
aagcaattcacccttc

SEQ ID NO: 658 - DNA, 16 bp, synthetic construct
  source 1..16: mol_type = other DNA
catgataaatgctact

SEQ ID NO: 659 - DNA, 16 bp, synthetic construct
  source 1..16: mol_type = other DNA
gtgtagaaactgctgg

SEQ ID NO: 660 - DNA, 16 bp, synthetic construct
  source 1..16: mol_type = other DNA
acaaatctcagttccc

SEQ ID NO: 661 - DNA, 16 bp, synthetic construct
  source 1..16: mol_type = other DNA
gcagaagagttcttgt

SEQ ID NO: 662 - DNA, 16 bp, synthetic construct
  source 1..16: mol_type = other DNA
ttaatgacattctctc

SEQ ID NO: 663 - DNA, 16 bp, synthetic construct
  source 1..16: mol_type = other DNA
actattcaatacatct

SEQ ID NO: 664 - DNA, 16 bp, synthetic construct
  source 1..16: mol_type = other DNA
gcatttagttatctag

SEQ ID NO: 665 - DNA, 16 bp, synthetic construct
  source 1..16: mol_type = other DNA
ttgtagattcctcagg

SEQ ID NO: 666 - DNA, 16 bp, synthetic construct
  source 1..16: mol_type = other DNA
atctaattactatcca

SEQ ID NO: 667 - DNA, 16 bp, synthetic construct
  source 1..16: mol_type = other DNA
tatattgatggatgta

SEQ ID NO: 668 - DNA, 16 bp, synthetic construct
  source 1..16: mol_type = other DNA
acattaagattgctgc

SEQ ID NO: 669 - DNA, 16 bp, synthetic construct
  source 1..16: mol_type = other DNA
ccagatggaacaccat

SEQ ID NO: 670 - DNA, 16 bp, synthetic construct
  source 1..16: mol_type = other DNA
gaaaatttgcttagac

SEQ ID NO: 671 - DNA, 16 bp, synthetic construct
  source 1..16: mol_type = other DNA
tcaaactatatactct

SEQ ID NO: 672 - DNA, 16 bp, synthetic construct
  source 1..16: mol_type = other DNA
gatcttgaagatgcca

SEQ ID NO: 673 - DNA, 16 bp, synthetic construct
  source 1..16: mol_type = other DNA
gcaatagtatactttg

SEQ ID NO: 674 - DNA, 16 bp, synthetic construct
  source 1..16: mol_type = other DNA
gcaaatgtaaacttga

SEQ ID NO: 675 - DNA, 16 bp, synthetic construct
  source 1..16: mol_type = other DNA
gcatagaactaggtgt

SEQ ID NO: 676 - DNA, 16 bp, synthetic construct
  source 1..16: mol_type = other DNA
gaagtagtaagtcatt

SEQ ID NO: 677 - DNA, 16 bp, synthetic construct
  source 1..16: mol_type = other DNA
aagtatatcgcacaca

SEQ ID NO: 678 - DNA, 16 bp, synthetic construct
  source 1..16: mol_type = other DNA
cctattaaagactctc

SEQ ID NO: 679 - DNA, 16 bp, synthetic construct
  source 1..16: mol_type = other DNA
acaacttaaagtcctc

SEQ ID NO: 680 - DNA, 16 bp, synthetic construct
  source 1..16: mol_type = other DNA
agattattaggacaca

SEQ ID NO: 681 - DNA, 16 bp, synthetic construct
  source 1..16: mol_type = other DNA
cagataaaggaggctt

SEQ ID NO: 682 - DNA, 16 bp, synthetic construct
  source 1..16: mol_type = other DNA
gtaaattatactcacc

SEQ ID NO: 683 - DNA, 16 bp, synthetic construct
  source 1..16: mol_type = other DNA
aatatttagtattggg

SEQ ID NO: 684 - DNA, 16 bp, synthetic construct
  source 1..16: mol_type = other DNA
ctaatatttccaacca

SEQ ID NO: 685 - DNA, 16 bp, synthetic construct
  source 1..16: mol_type = other DNA
ggctaatggtgacaga

SEQ ID NO: 686 - DNA, 16 bp, synthetic construct
  source 1..16: mol_type = other DNA
atcttttgaatctgtc

SEQ ID NO: 687 - DNA, 16 bp, synthetic construct
  source 1..16: mol_type = other DNA
tatcatgaaaaccctc

SEQ ID NO: 688 - DNA, 16 bp, synthetic construct
  source 1..16: mol_type = other DNA
gacacaaaggaaccca

SEQ ID NO: 689 - DNA, 16 bp, synthetic construct
  source 1..16: mol_type = other DNA
gatcatatacaatgac

SEQ ID NO: 690 - DNA, 16 bp, synthetic construct
  source 1..16: mol_type = other DNA
ccggattttatacttt

SEQ ID NO: 691 - DNA, 16 bp, synthetic construct
  source 1..16: mol_type = other DNA
tctcaatattgtgtgt

SEQ ID NO: 692 - DNA, 16 bp, synthetic construct
  source 1..16: mol_type = other DNA
gagtataaagctatcc

SEQ ID NO: 693 - DNA, 16 bp, synthetic construct
  source 1..16: mol_type = other DNA
atgatatggtgggtac

SEQ ID NO: 694 - DNA, 16 bp, synthetic construct
  source 1..16: mol_type = other DNA
ttctagcataaagtct

SEQ ID NO: 695 - DNA, 16 bp, synthetic construct
  source 1..16: mol_type = other DNA
cataccacttagacac

SEQ ID NO: 696 - DNA, 16 bp, synthetic construct
  source 1..16: mol_type = other DNA
gagaaatcaacaccct

SEQ ID NO: 697 - DNA, 16 bp, synthetic construct
  source 1..16: mol_type = other DNA
atattaactccagcta

SEQ ID NO: 698 - DNA, 16 bp, synthetic construct
  source 1..16: mol_type = other DNA
aaaagtattgctcagt

SEQ ID NO: 699 - DNA, 16 bp, synthetic construct
  source 1..16: mol_type = other DNA
gaaatactgtagcaag

SEQ ID NO: 700 - DNA, 16 bp, synthetic construct
  source 1..16: mol_type = other DNA
cacaattcaaactctc

SEQ ID NO: 701 - DNA, 16 bp, synthetic construct
  source 1..16: mol_type = other DNA
gaaatgattggtggag

SEQ ID NO: 702 - DNA, 16 bp, synthetic construct
  source 1..16: mol_type = other DNA
aggcaatggactccat

SEQ ID NO: 703 - DNA, 16 bp, synthetic construct
  source 1..16: mol_type = other DNA
atcttaaggtcttatg

SEQ ID NO: 704 - DNA, 16 bp, synthetic construct
  source 1..16: mol_type = other DNA
tctataggatgctggg

SEQ ID NO: 705 - DNA, 16 bp, synthetic construct
  source 1..16: mol_type = other DNA
tgttttacgactggca

SEQ ID NO: 706 - DNA, 16 bp, synthetic construct
  source 1..16: mol_type = other DNA
tgtgtattattgacct

SEQ ID NO: 707 - DNA, 16 bp, synthetic construct
  source 1..16: mol_type = other DNA
gaagtgtattaaaact

SEQ ID NO: 708 - DNA, 16 bp, synthetic construct
  source 1..16: mol_type = other DNA
gtaagcacttaatatt

SEQ ID NO: 709 - DNA, 16 bp, synthetic construct
  source 1..16: mol_type = other DNA
acaactattttataga

SEQ ID NO: 710 - DNA, 16 bp, synthetic construct
  source 1..16: mol_type = other DNA
acaccctgaactacag

SEQ ID NO: 711 - DNA, 16 bp, synthetic construct
  source 1..16: mol_type = other DNA
aatagtatcagctcat

SEQ ID NO: 712 - DNA, 16 bp, synthetic construct
  source 1..16: mol_type = other DNA
gtctttaaaatcagtt

SEQ ID NO: 713 - DNA, 16 bp, synthetic construct
  source 1..16: mol_type = other DNA
agtattaattatccct

SEQ ID NO: 714 - DNA, 16 bp, synthetic construct
  source 1..16: mol_type = other DNA
gattataaacacctca

SEQ ID NO: 715 - DNA, 16 bp, synthetic construct
  source 1..16: mol_type = other DNA
gtcaaacagacactaa

SEQ ID NO: 716 - DNA, 16 bp, synthetic construct
  source 1..16: mol_type = other DNA
cgtgaatacaacaaca

SEQ ID NO: 717 - DNA, 16 bp, synthetic construct
  source 1..16: mol_type = other DNA
cttttagtcatttccc

SEQ ID NO: 718 - DNA, 16 bp, synthetic construct
  source 1..16: mol_type = other DNA
ctcaaactatatactc

SEQ ID NO: 719 - DNA, 16 bp, synthetic construct
  source 1..16: mol_type = other DNA
cttacaacggtactta

SEQ ID NO: 720 - DNA, 16 bp, synthetic construct
  source 1..16: mol_type = other DNA
gtaactattcaataca

SEQ ID NO: 721 - DNA, 16 bp, synthetic construct
  source 1..16: mol_type = other DNA
gactattattccacac

SEQ ID NO: 722 - DNA, 16 bp, synthetic construct
  source 1..16: mol_type = other DNA
gatattcaatgtgctc

SEQ ID NO: 723 - DNA, 16 bp, synthetic construct
  source 1..16: mol_type = other DNA
aattagttaatcttcc

SEQ ID NO: 724 - DNA, 16 bp, synthetic construct
  source 1..16: mol_type = other DNA
tgaattaagaacaagg

SEQ ID NO: 725 - DNA, 16 bp, synthetic construct
  source 1..16: mol_type = other DNA
actagtaaaagactag

SEQ ID NO: 726 - DNA, 16 bp, synthetic construct
  source 1..16: mol_type = other DNA
gcattagaagaagcag

SEQ ID NO: 727 - DNA, 16 bp, synthetic construct
  source 1..16: mol_type = other DNA
ggcaatagtatacttt

SEQ ID NO: 728 - DNA, 16 bp, synthetic construct
  source 1..16: mol_type = other DNA
cctctaatttagttct

SEQ ID NO: 729 - DNA, 16 bp, synthetic construct
  source 1..16: mol_type = other DNA
cagcatttagttatct

SEQ ID NO: 730 - DNA, 16 bp, synthetic construct
  source 1..16: mol_type = other DNA
acactagtagaatgtg

SEQ ID NO: 731 - DNA, 16 bp, synthetic construct
  source 1..16: mol_type = other DNA
aacattaagattgctg

SEQ ID NO: 732 - DNA, 16 bp, synthetic construct
  source 1..16: mol_type = other DNA
tagaatattctggctc

SEQ ID NO: 733 - DNA, 16 bp, synthetic construct
  source 1..16: mol_type = other DNA
cctaatatttccaacc

SEQ ID NO: 734 - DNA, 16 bp, synthetic construct
  source 1..16: mol_type = other DNA
gcatattcacacagat

SEQ ID NO: 735 - DNA, 16 bp, synthetic construct
  source 1..16: mol_type = other DNA
gaatatgcccaaacca

SEQ ID NO: 736 - DNA, 16 bp, synthetic construct
  source 1..16: mol_type = other DNA
aagattttaactgtcg

SEQ ID NO: 737 - DNA, 16 bp, synthetic construct
  source 1..16: mol_type = other DNA
catttagaggcattgc

SEQ ID NO: 738 - DNA, 16 bp, synthetic construct
  source 1..16: mol_type = other DNA
gcaagaatagtatgtt

SEQ ID NO: 739 - DNA, 16 bp, synthetic construct
  source 1..16: mol_type = other DNA
tacaaatctcagttcc

SEQ ID NO: 740 - DNA, 16 bp, synthetic construct
  source 1..16: mol_type = other DNA
acagatttagtgatga

SEQ ID NO: 741 - DNA, 16 bp, synthetic construct
  source 1..16: mol_type = other DNA
aagtaggtgtattgat

SEQ ID NO: 742 - DNA, 16 bp, synthetic construct
  source 1..16: mol_type = other DNA
ctacagtatccattca

SEQ ID NO: 743 - DNA, 16 bp, synthetic construct
  source 1..16: mol_type = other DNA
gctaagggtattgtcc

SEQ ID NO: 744 - DNA, 16 bp, synthetic construct
  source 1..16: mol_type = other DNA
acaatagatcaccagc

SEQ ID NO: 745 - DNA, 16 bp, synthetic construct
  source 1..16: mol_type = other DNA
tcacaatgaatggcca

SEQ ID NO: 746 - DNA, 16 bp, synthetic construct
  source 1..16: mol_type = other DNA
actattgaatgactta

SEQ ID NO: 747 - DNA, 16 bp, synthetic construct
  source 1..16: mol_type = other DNA
ctcattaaatcaaggc

SEQ ID NO: 748 - DNA, 16 bp, synthetic construct
  source 1..16: mol_type = other DNA
acactatgatcagcaa

SEQ ID NO: 749 - DNA, 16 bp, synthetic construct
  source 1..16: mol_type = other DNA
gctatacaggatcttc

SEQ ID NO: 750 - DNA, 16 bp, synthetic construct
  source 1..16: mol_type = other DNA
caggtaaggcaatgga

SEQ ID NO: 751 - DNA, 16 bp, synthetic construct
  source 1..16: mol_type = other DNA
tcacaagttctacata

SEQ ID NO: 752 - DNA, 16 bp, synthetic construct
  source 1..16: mol_type = other DNA
catcattaacatctcc

SEQ ID NO: 753 - DNA, 16 bp, synthetic construct
  source 1..16: mol_type = other DNA
agcataaattataggt

SEQ ID NO: 754 - DNA, 16 bp, synthetic construct
  source 1..16: mol_type = other DNA
gatgtaattcacctgt

SEQ ID NO: 755 - DNA, 16 bp, synthetic construct
  source 1..16: mol_type = other DNA
aatctaattatggcta

SEQ ID NO: 756 - DNA, 16 bp, synthetic construct
  source 1..16: mol_type = other DNA
acttttgagattcctg

SEQ ID NO: 757 - DNA, 16 bp, synthetic construct
  source 1..16: mol_type = other DNA
ggtaataaatgctaca

SEQ ID NO: 758 - DNA, 16 bp, synthetic construct
  source 1..16: mol_type = other DNA
gtcaagtaatgagttt

SEQ ID NO: 759 - DNA, 16 bp, synthetic construct
  source 1..16: mol_type = other DNA
gcagattcaagtattt

SEQ ID NO: 760 - DNA, 16 bp, synthetic construct
  source 1..16: mol_type = other DNA
catatttgtagattcc

SEQ ID NO: 761 - DNA, 16 bp, synthetic construct
  source 1..16: mol_type = other DNA
aggtattactggaatc

SEQ ID NO: 762 - DNA, 16 bp, synthetic construct
  source 1..16: mol_type = other DNA
gacatatgacagagtt

SEQ ID NO: 763 - DNA, 16 bp, synthetic construct
  source 1..16: mol_type = other DNA
cccaagtatatctaga

SEQ ID NO: 764 - DNA, 16 bp, synthetic construct
  source 1..16: mol_type = other DNA
gatactacaacactgg

SEQ ID NO: 765 - DNA, 16 bp, synthetic construct
  source 1..16: mol_type = other DNA
accaataggcaagttt

SEQ ID NO: 766 - DNA, 16 bp, synthetic construct
  source 1..16: mol_type = other DNA
agctattagatttaca

SEQ ID NO: 767 - DNA, 16 bp, synthetic construct
  source 1..16: mol_type = other DNA
gcaaaaacacgagtgg

SEQ ID NO: 768 - DNA, 16 bp, synthetic construct
  source 1..16: mol_type = other DNA
tcagaaatactgtagc

SEQ ID NO: 769 - DNA, 16 bp, synthetic construct
  source 1..16: mol_type = other DNA
tttcatagcgggtttt

SEQ ID NO: 770 - DNA, 16 bp, synthetic construct
  source 1..16: mol_type = other DNA
aacataccacttagac

SEQ ID NO: 771 - DNA, 16 bp, synthetic construct
  source 1..16: mol_type = other DNA
caaaagtattgctcag

SEQ ID NO: 772 - DNA, 16 bp, synthetic construct
  source 1..16: mol_type = other DNA
ctgaaatgattggtgg

SEQ ID NO: 773 - DNA, 16 bp, synthetic construct
  source 1..16: mol_type = other DNA
agctaatgtgcttccc

SEQ ID NO: 774 - DNA, 16 bp, synthetic construct
  source 1..16: mol_type = other DNA
aaatgatatggtgggt

SEQ ID NO: 775 - DNA, 16 bp, synthetic construct
  source 1..16: mol_type = other DNA
gtaactaccaacacat

SEQ ID NO: 776 - DNA, 16 bp, synthetic construct
  source 1..16: mol_type = other DNA
caacatctgatctttt

SEQ ID NO: 777 - DNA, 16 bp, synthetic construct
  source 1..16: mol_type = other DNA
gtataaagaagtgttg

SEQ ID NO: 778 - DNA, 16 bp, synthetic construct
  source 1..16: mol_type = other DNA
gaattttctagcataa

SEQ ID NO: 779 - DNA, 16 bp, synthetic construct
  source 1..16: mol_type = other DNA
tagaatagcccatcac

SEQ ID NO: 780 - DNA, 16 bp, synthetic construct
  source 1..16: mol_type = other DNA
ggagaaatcaacaccc

SEQ ID NO: 781 - DNA, 16 bp, synthetic construct
  source 1..16: mol_type = other DNA
atctataggatgctgg

SEQ ID NO: 782 - DNA, 16 bp, synthetic construct
  source 1..16: mol_type = other DNA
gtgttttacgactggc

SEQ ID NO: 783 - DNA, 16 bp, synthetic construct
  source 1..16: mol_type = other DNA
attggagaagtgtatt

SEQ ID NO: 784 - DNA, 16 bp, synthetic construct
  source 1..16: mol_type = other DNA
gcacaggtaaggcaat

SEQ ID NO: 785 - DNA, 16 bp, synthetic construct
  source 1..16: mol_type = other DNA
ggacaaggttttttgg

SEQ ID NO: 786 - DNA, 16 bp, synthetic construct
  source 1..16: mol_type = other DNA
aaaaatgtgtggaaac

SEQ ID NO: 787 - DNA, 16 bp, synthetic construct
  source 1..16: mol_type = other DNA
agttttttgaacaact

SEQ ID NO: 788 - DNA, 16 bp, synthetic construct
  source 1..16: mol_type = other DNA
tttagagaccacaccc

SEQ ID NO: 789 - DNA, 16 bp, synthetic construct
  source 1..16: mol_type = other DNA
tggtatgataatagta

SEQ ID NO: 790 - DNA, 16 bp, synthetic construct
  source 1..16: mol_type = other DNA
agaatgaagagtcttt

SEQ ID NO: 791 - DNA, 16 bp, synthetic construct
  source 1..16: mol_type = other DNA
ggctaagggtattgtc

SEQ ID NO: 792 - DNA, 16 bp, synthetic construct
  source 1..16: mol_type = other DNA
cagtatactattgccc

SEQ ID NO: 793 - DNA, 16 bp, synthetic construct
  source 1..16: mol_type = other DNA
gttcaaggttttgtgc

SEQ ID NO: 794 - DNA, 16 bp, synthetic construct
  source 1..16: mol_type = other DNA
caagacaagccagtgg

SEQ ID NO: 795 - DNA, 16 bp, synthetic construct
  source 1..16: mol_type = other DNA
acacatttaacatgtc

SEQ ID NO: 796 - DNA, 16 bp, synthetic construct
  source 1..16: mol_type = other DNA
aaccatttactgtcta

SEQ ID NO: 797 - DNA, 16 bp, synthetic construct
  source 1..16: mol_type = other DNA
gaaactaaaaagtccc

SEQ ID NO: 798 - DNA, 16 bp, synthetic construct
  source 1..16: mol_type = other DNA
gatgataaatgtagat

SEQ ID NO: 799 - DNA, 16 bp, synthetic construct
  source 1..16: mol_type = other DNA
ttctttagatcattca

SEQ ID NO: 800 - DNA, 16 bp, synthetic construct
  source 1..16: mol_type = other DNA
tgtatattaacctcta

SEQ ID NO: 801 - DNA, 16 bp, synthetic construct
  source 1..16: mol_type = other DNA
tattatttcaactagt

SEQ ID NO: 802 - DNA, 16 bp, synthetic construct
  source 1..16: mol_type = other DNA
aacatttagaggcatt

SEQ ID NO: 803 - DNA, 16 bp, synthetic construct
  source 1..16: mol_type = other DNA
tgaaattggttactag

SEQ ID NO: 804 - DNA, 16 bp, synthetic construct
  source 1..16: mol_type = other DNA
taacctacagtatcca

SEQ ID NO: 805 - DNA, 16 bp, synthetic construct
  source 1..16: mol_type = other DNA
ggttattgaaaggtaa

SEQ ID NO: 806 - DNA, 16 bp, synthetic construct
  source 1..16: mol_type = other DNA
aaccctaatatttcca

SEQ ID NO: 807 - DNA, 16 bp, synthetic construct
  source 1..16: mol_type = other DNA
gacaataatttgagac

SEQ ID NO: 808 - DNA, 16 bp, synthetic construct
  source 1..16: mol_type = other DNA
actatacaaatctcag

SEQ ID NO: 809 - DNA, 16 bp, synthetic construct
  source 1..16: mol_type = other DNA
gtaaatttctctcaca

SEQ ID NO: 810 - DNA, 16 bp, synthetic construct
  source 1..16: mol_type = other DNA
taggaatgagctgtca

SEQ ID NO: 811 - DNA, 16 bp, synthetic construct
  source 1..16: mol_type = other DNA
ccaaatattggtagtt

SEQ ID NO: 812 - DNA, 16 bp, synthetic construct
  source 1..16: mol_type = other DNA
aataccttaagctctc

SEQ ID NO: 813 - DNA, 16 bp, synthetic construct
  source 1..16: mol_type = other DNA
catactaatatgcttt

SEQ ID NO: 814 - DNA, 16 bp, synthetic construct
  source 1..16: mol_type = other DNA
aatttacttacctcag

SEQ ID NO: 815 - DNA, 16 bp, synthetic construct
  source 1..16: mol_type = other DNA
tgtcataacttctggt

SEQ ID NO: 816 - DNA, 16 bp, synthetic construct
  source 1..16: mol_type = other DNA
cagcataaattatagg

SEQ ID NO: 817 - DNA, 16 bp, synthetic construct
  source 1..16: mol_type = other DNA
tagaatacaagacaca

SEQ ID NO: 818 - DNA, 16 bp, synthetic construct
  source 1..16: mol_type = other DNA
gcagatgtaattcacc

SEQ ID NO: 819 - DNA, 16 bp, synthetic construct
  source 1..16: mol_type = other DNA
ctgatatgagagatgt

SEQ ID NO: 820 - DNA, 16 bp, synthetic construct
  source 1..16: mol_type = other DNA
tgtagaaagacagggc

SEQ ID NO: 821 - DNA, 16 bp, synthetic construct
  source 1..16: mol_type = other DNA
taatctaaggagccag

SEQ ID NO: 822 - DNA, 16 bp, synthetic construct
  source 1..16: mol_type = other DNA
cataagtcatccacat

SEQ ID NO: 823 - DNA, 16 bp, synthetic construct
  source 1..16: mol_type = other DNA
aatcattcaaccctca

SEQ ID NO: 824 - DNA, 16 bp, synthetic construct
  source 1..16: mol_type = other DNA
cacattaaaggacttt

SEQ ID NO: 825 - DNA, 16 bp, synthetic construct
  source 1..16: mol_type = other DNA
agtaaattatcaatcc

SEQ ID NO: 826 - DNA, 16 bp, synthetic construct
  source 1..16: mol_type = other DNA
gtttattcaaggacta

SEQ ID NO: 827 - DNA, 16 bp, synthetic construct
  source 1..16: mol_type = other DNA
atgaataacactattc

SEQ ID NO: 828 - DNA, 16 bp, synthetic construct
  source 1..16: mol_type = other DNA
tctaatagggcacttc

SEQ ID NO: 829 - DNA, 16 bp, synthetic construct
  source 1..16: mol_type = other DNA
acagagtaacaacccc

SEQ ID NO: 830 - DNA, 16 bp, synthetic construct
  source 1..16: mol_type = other DNA
ctcattaagttcttca

SEQ ID NO: 831 - DNA, 16 bp, synthetic construct
  source 1..16: mol_type = other DNA
ctgaattagtcctacc

SEQ ID NO: 832 - DNA, 16 bp, synthetic construct
  source 1..16: mol_type = other DNA
agtataaagaagtgtt

SEQ ID NO: 833 - DNA, 16 bp, synthetic construct
  source 1..16: mol_type = other DNA
taaacttctataccca

SEQ ID NO: 834 - DNA, 16 bp, synthetic construct
  source 1..16: mol_type = other DNA
ccattaacatcctttc

SEQ ID NO: 835 - DNA, 16 bp, synthetic construct
  source 1..16: mol_type = other DNA
tctaatggagagtccc

SEQ ID NO: 836 - DNA, 16 bp, synthetic construct
  source 1..16: mol_type = other DNA
gaagtaggtgtattga

SEQ ID NO: 837 - DNA, 16 bp, synthetic construct
  source 1..16: mol_type = other DNA
gatattaatatcctct

SEQ ID NO: 838 - DNA, 16 bp, synthetic construct
  source 1..16: mol_type = other DNA
acaatatgggcttcaa

SEQ ID NO: 839 - DNA, 16 bp, synthetic construct
  source 1..16: mol_type = other DNA
aaatctaattatggct

SEQ ID NO: 840 - DNA, 16 bp, synthetic construct
  source 1..16: mol_type = other DNA
ccaattacagatcaca

SEQ ID NO: 841 - DNA, 16 bp, synthetic construct
  source 1..16: mol_type = other DNA
atgattcgatttcata

SEQ ID NO: 842 - DNA, 16 bp, synthetic construct
  source 1..16: mol_type = other DNA
ttattatcacaagttc

SEQ ID NO: 843 - DNA, 16 bp, synthetic construct
  source 1..16: mol_type = other DNA
aggaatataaccaggg

SEQ ID NO: 844 - DNA, 16 bp, synthetic construct
  source 1..16: mol_type = other DNA
gattatgtcatgctgc

SEQ ID NO: 845 - DNA, 16 bp, synthetic construct
  source 1..16: mol_type = other DNA
aatttagtttgatcaa

SEQ ID NO: 846 - DNA, 16 bp, synthetic construct
  source 1..16: mol_type = other DNA
atcataataacatacc

SEQ ID NO: 847 - DNA, 16 bp, synthetic construct
  source 1..16: mol_type = other DNA
acacataatccaggga

SEQ ID NO: 848 - DNA, 16 bp, synthetic construct
  source 1..16: mol_type = other DNA
ctagaatagcccatca

SEQ ID NO: 849 - DNA, 16 bp, synthetic construct
  source 1..16: mol_type = other DNA
taaatgatatggtggg

SEQ ID NO: 850 - DNA, 16 bp, synthetic construct
  source 1..16: mol_type = other DNA
gagttaatattagtga

SEQ ID NO: 851 - DNA, 16 bp, synthetic construct
  source 1..16: mol_type = other DNA
gaaatggaatcagcac

SEQ ID NO: 852 - DNA, 16 bp, synthetic construct
  source 1..16: mol_type = other DNA
caaactgtcatgcaga

SEQ ID NO: 853 - DNA, 16 bp, synthetic construct
  source 1..16: mol_type = other DNA
atacatttcatagcgg

SEQ ID NO: 854 - DNA, 16 bp, synthetic construct
  source 1..16: mol_type = other DNA
actgaaatgattggtg

SEQ ID NO: 855 - DNA, 16 bp, synthetic construct
  source 1..16: mol_type = other DNA
ttagaatattctggct

SEQ ID NO: 856 - DNA, 16 bp, synthetic construct
  source 1..16: mol_type = other DNA
aatagtttgagactat

SEQ ID NO: 857 - DNA, 16 bp, synthetic construct
  source 1..16: mol_type = other DNA
aaagattcacaaggtt

SEQ ID NO: 858 - DNA, 16 bp, synthetic construct
  source 1..16: mol_type = other DNA
tgtgttttacgactgg

SEQ ID NO: 859 - DNA, 16 bp, synthetic construct
  source 1..16: mol_type = other DNA
tattggagaagtgtat

SEQ ID NO: 860 - DNA, 16 bp, synthetic construct
  source 1..16: mol_type = other DNA
agaaattagttaaacg

SEQ ID NO: 861 - DNA, 16 bp, synthetic construct
  source 1..16: mol_type = other DNA
cataacagctacattt

SEQ ID NO: 862 - DNA, 16 bp, synthetic construct
  source 1..16: mol_type = other DNA
cgcagatgaaatttta

SEQ ID NO: 863 - DNA, 16 bp, synthetic construct
  source 1..16: mol_type = other DNA
acaaagtaactttgcc

SEQ ID NO: 864 - DNA, 16 bp, synthetic construct
  source 1..16: mol_type = other DNA
aacacggcaggccagt

SEQ ID NO: 865 - DNA, 16 bp, synthetic construct
  source 1..16: mol_type = other DNA
atggtatgataatagt

SEQ ID NO: 866 - DNA, 16 bp, synthetic construct
  source 1..16: mol_type = other DNA
ccagcaaaaaaaggaa

SEQ ID NO: 867 - DNA, 16 bp, synthetic construct
  source 1..16: mol_type = other DNA
tctcaaaatctatagg

SEQ ID NO: 868 - DNA, 16 bp, synthetic construct
  source 1..16: mol_type = other DNA
gtcttaagagattccc

SEQ ID NO: 869 - DNA, 16 bp, synthetic construct
  source 1..16: mol_type = other DNA
aaaatctaattatggc

SEQ ID NO: 870 - DNA, 16 bp, synthetic construct
  source 1..16: mol_type = other DNA
gctcattaagttcttc

SEQ ID NO: 871 - DNA, 16 bp, synthetic construct
  source 1..16: mol_type = other DNA
agtaaacattgacagg

SEQ ID NO: 872 - DNA, 16 bp, synthetic construct
  source 1..16: mol_type = other DNA
aaggaatataaccagg

SEQ ID NO: 873 - DNA, 16 bp, synthetic construct
  source 1..16: mol_type = other DNA
gtctaacacatacttg

SEQ ID NO: 874 - DNA, 16 bp, synthetic construct
  source 1..16: mol_type = other DNA
gaagacagtattgctt

SEQ ID NO: 875 - DNA, 16 bp, synthetic construct
  source 1..16: mol_type = other DNA
gctaagattatccgtc

SEQ ID NO: 876 - DNA, 16 bp, synthetic construct
  source 1..16: mol_type = other DNA
ccagtaacatccattt

SEQ ID NO: 877 - DNA, 16 bp, synthetic construct
  source 1..16: mol_type = other DNA
gaatttagtttgatca

SEQ ID NO: 878 - DNA, 16 bp, synthetic construct
  source 1..16: mol_type = other DNA
gaaacattcagactca

SEQ ID NO: 879 - DNA, 16 bp, synthetic construct
  source 1..16: mol_type = other DNA
gcattaaggagaaggt

SEQ ID NO: 880 - DNA, 16 bp, synthetic construct
  source 1..16: mol_type = other DNA
tgaattagagatactg

SEQ ID NO: 881 - DNA, 16 bp, synthetic construct
  source 1..16: mol_type = other DNA
tccaattacagatcac

SEQ ID NO: 882 - DNA, 16 bp, synthetic construct
  source 1..16: mol_type = other DNA
ttaaactatgcagtcc

SEQ ID NO: 883 - DNA, 16 bp, synthetic construct
  source 1..16: mol_type = other DNA
acatattaatgtctca

SEQ ID NO: 884 - DNA, 16 bp, synthetic construct
  source 1..16: mol_type = other DNA
acattatctcagaagg

SEQ ID NO: 885 - DNA, 16 bp, synthetic construct
  source 1..16: mol_type = other DNA
cccatatgacaattcc

SEQ ID NO: 886 - DNA, 16 bp, synthetic construct
  source 1..16: mol_type = other DNA
aatagtacaggtgaga

SEQ ID NO: 887 - DNA, 16 bp, synthetic construct
  source 1..16: mol_type = other DNA
gaatatttacaatgcg

SEQ ID NO: 888 - DNA, 16 bp, synthetic construct
  source 1..16: mol_type = other DNA
gccaattttatagcca

SEQ ID NO: 889 - DNA, 16 bp, synthetic construct
  source 1..16: mol_type = other DNA
taggtatagaactgga

SEQ ID NO: 890 - DNA, 16 bp, synthetic construct
  source 1..16: mol_type = other DNA
tcaaatcgcacttcaa

SEQ ID NO: 891 - DNA, 16 bp, synthetic construct
  source 1..16: mol_type = other DNA
ctaacctacagtatcc

SEQ ID NO: 892 - DNA, 16 bp, synthetic construct
  source 1..16: mol_type = other DNA
atttattctagtacca

SEQ ID NO: 893 - DNA, 16 bp, synthetic construct
  source 1..16: mol_type = other DNA
gctaattcaaacactg

SEQ ID NO: 894 - DNA, 16 bp, synthetic construct
  source 1..16: mol_type = other DNA
gcatagtattcctggc

SEQ ID NO: 895 - DNA, 16 bp, synthetic construct
  source 1..16: mol_type = other DNA
gaatcaatgaactctt

SEQ ID NO: 896 - DNA, 16 bp, synthetic construct
  source 1..16: mol_type = other DNA
aggattagagcctagg

SEQ ID NO: 897 - DNA, 16 bp, synthetic construct
  source 1..16: mol_type = other DNA
gaatttgagctcatct

SEQ ID NO: 898 - DNA, 16 bp, synthetic construct
  source 1..16: mol_type = other DNA
aacaatgctgattcag

SEQ ID NO: 899 - DNA, 16 bp, synthetic construct
  source 1..16: mol_type = other DNA
ggattaagtggaggtt

SEQ ID NO: 900 - DNA, 16 bp, synthetic construct
  source 1..16: mol_type = other DNA
gtattactattacatc

SEQ ID NO: 901 - DNA, 16 bp, synthetic construct
  source 1..16: mol_type = other DNA
cattattgcacaggta

SEQ ID NO: 902 - DNA, 16 bp, synthetic construct
  source 1..16: mol_type = other DNA
ctaacataatacttca

SEQ ID NO: 903 - DNA, 16 bp, synthetic construct
  source 1..16: mol_type = other DNA
agaatagacttggtta

SEQ ID NO: 904 - DNA, 16 bp, synthetic construct
  source 1..16: mol_type = other DNA
ccaaattctgtgaact

SEQ ID NO: 905 - DNA, 16 bp, synthetic construct
  source 1..16: mol_type = other DNA
ccactaaatttttccc

SEQ ID NO: 906 - DNA, 16 bp, synthetic construct
  source 1..16: mol_type = other DNA
actaatctaaggagcc

SEQ ID NO: 907 - DNA, 16 bp, synthetic construct
  source 1..16: mol_type = other DNA
ctcataagtcatccac

SEQ ID NO: 908 - DNA, 16 bp, synthetic construct
  source 1..16: mol_type = other DNA
aatatggtatcttgtc

SEQ ID NO: 909 - DNA, 16 bp, synthetic construct
  source 1..16: mol_type = other DNA
catacaagtaacatcc

SEQ ID NO: 910 - DNA, 16 bp, synthetic construct
  source 1..16: mol_type = other DNA
gatagagagatttgtc

SEQ ID NO: 911 - DNA, 16 bp, synthetic construct
  source 1..16: mol_type = other DNA
gaggttataattgagc

SEQ ID NO: 912 - DNA, 16 bp, synthetic construct
  source 1..16: mol_type = other DNA
gaagatacaactcacg

SEQ ID NO: 913 - DNA, 16 bp, synthetic construct
  source 1..16: mol_type = other DNA
gccaaatattggtagt

SEQ ID NO: 914 - DNA, 16 bp, synthetic construct
  source 1..16: mol_type = other DNA
atcatttagatgcatg

SEQ ID NO: 915 - DNA, 16 bp, synthetic construct
  source 1..16: mol_type = other DNA
gaacatttagaggcat

SEQ ID NO: 916 - DNA, 16 bp, synthetic construct
  source 1..16: mol_type = other DNA
aaatttacttacctca

SEQ ID NO: 917 - DNA, 16 bp, synthetic construct
  source 1..16: mol_type = other DNA
ttaagtagatgatgag

SEQ ID NO: 918 - DNA, 16 bp, synthetic construct
  source 1..16: mol_type = other DNA
tagtaaatttctctca

SEQ ID NO: 919 - DNA, 16 bp, synthetic construct
  source 1..16: mol_type = other DNA
ataaccatttactgtc

SEQ ID NO: 920 - DNA, 16 bp, synthetic construct
  source 1..16: mol_type = other DNA
aatacgactgatggtc

SEQ ID NO: 921 - DNA, 16 bp, synthetic construct
  source 1..16: mol_type = other DNA
gcaaaaatagtttgag

SEQ ID NO: 922 - DNA, 16 bp, synthetic construct
  source 1..16: mol_type = other DNA
actagaatagcccatc

SEQ ID NO: 923 - DNA, 16 bp, synthetic construct
  source 1..16: mol_type = other DNA
gatcactagtatctgg

SEQ ID NO: 924 - DNA, 16 bp, synthetic construct
  source 1..16: mol_type = other DNA
gagacttaagaaaacc

SEQ ID NO: 925 - DNA, 16 bp, synthetic construct
  source 1..16: mol_type = other DNA
ataaatgatatggtgg

SEQ ID NO: 926 - DNA, 16 bp, synthetic construct
  source 1..16: mol_type = other DNA
caaacatggtatactg

SEQ ID NO: 927 - DNA, 16 bp, synthetic construct
  source 1..16: mol_type = other DNA
tatcaatctttcctca

SEQ ID NO: 928 - DNA, 16 bp, synthetic construct
  source 1..16: mol_type = other DNA
tacacataatccaggg

SEQ ID NO: 929 - DNA, 16 bp, synthetic construct
  source 1..16: mol_type = other DNA
gcaaaagattcacaag

SEQ ID NO: 930 - DNA, 16 bp, synthetic construct
  source 1..16: mol_type = other DNA
ctaagtaactttttgc

SEQ ID NO: 931 - DNA, 16 bp, synthetic construct
  source 1..16: mol_type = other DNA
gagagttaaaagtgag

SEQ ID NO: 932 - DNA, 16 bp, synthetic construct
  source 1..16: mol_type = other DNA
acatatggcaccagga

SEQ ID NO: 933 - DNA, 16 bp, synthetic construct
  source 1..16: mol_type = other DNA
tagtataaagaagtgt

SEQ ID NO: 934 - DNA, 16 bp, synthetic construct
  source 1..16: mol_type = other DNA
ctcaaagtcagacact

SEQ ID NO: 935 - DNA, 16 bp, synthetic construct
  source 1..16: mol_type = other DNA
gatatgaatggtatga

SEQ ID NO: 936 - DNA, 16 bp, synthetic construct
  source 1..16: mol_type = other DNA
ctattggagaagtgta

SEQ ID NO: 937 - DNA, 16 bp, synthetic construct
  source 1..16: mol_type = other DNA
gaaagaggtatttctg

SEQ ID NO: 938 - DNA, 16 bp, synthetic construct
  source 1..16: mol_type = other DNA
aattatgtgcagaaat

SEQ ID NO: 939 - DNA, 16 bp, synthetic construct
  source 1..16: mol_type = other DNA
gatgttttaacgcaga

SEQ ID NO: 940 - DNA, 16 bp, synthetic construct
  source 1..16: mol_type = other DNA
attatggcaggttggt

SEQ ID NO: 941 - DNA, 16 bp, synthetic construct
  source 1..16: mol_type = other DNA
aaaacaaagcacaggt

SEQ ID NO: 942 - DNA, 16 bp, synthetic construct
  source 1..16: mol_type = other DNA
cccccaacaaccagca

SEQ ID NO: 943 - DNA, 16 bp, synthetic construct
  source 1..16: mol_type = other DNA
cactttggaagactct

SEQ ID NO: 944 - DNA, 16 bp, synthetic construct
  source 1..16: mol_type = other DNA
agcattaaggagaagg

SEQ ID NO: 945 - DNA, 16 bp, synthetic construct
  source 1..16: mol_type = other DNA
gaacttttcattgcat

SEQ ID NO: 946 - DNA, 16 bp, synthetic construct
  source 1..16: mol_type = other DNA
agtaagacatgctcat

SEQ ID NO: 947 - DNA, 16 bp, synthetic construct
  source 1..16: mol_type = other DNA
gaggaatcaatgaact

SEQ ID NO: 948 - DNA, 16 bp, synthetic construct
  source 1..16: mol_type = other DNA
gcattattgcacaggt

SEQ ID NO: 949 - DNA, 16 bp, synthetic construct
  source 1..16: mol_type = other DNA
gaagtttgaagaatgc

SEQ ID NO: 950 - DNA, 16 bp, synthetic construct
  source 1..16: mol_type = other DNA
atctacattatctcag

SEQ ID NO: 951 - DNA, 16 bp, synthetic construct
  source 1..16: mol_type = other DNA
gattatacattctgag

SEQ ID NO: 952 - DNA, 16 bp, synthetic construct
  source 1..16: mol_type = other DNA
atagttacagtaatct

SEQ ID NO: 953 - DNA, 16 bp, synthetic construct
  source 1..16: mol_type = other DNA
acaaatagatgcttca

SEQ ID NO: 954 - DNA, 16 bp, synthetic construct
  source 1..16: mol_type = other DNA
aagatagagagatttg

SEQ ID NO: 955 - DNA, 16 bp, synthetic construct
  source 1..16: mol_type = other DNA
gaacaatgctgattca

SEQ ID NO: 956 - DNA, 16 bp, synthetic construct
  source 1..16: mol_type = other DNA
actaaagtaagttcca

SEQ ID NO: 957 - DNA, 16 bp, synthetic construct
  source 1..16: mol_type = other DNA
cttatttggagtggtt

SEQ ID NO: 958 - DNA, 16 bp, synthetic construct
  source 1..16: mol_type = other DNA
aaaccagtaacatcca

SEQ ID NO: 959 - DNA, 16 bp, synthetic construct
  source 1..16: mol_type = other DNA
gcagatttaaagtcaa

SEQ ID NO: 960 - DNA, 16 bp, synthetic construct
  source 1..16: mol_type = other DNA
ccatattctgtagcat

SEQ ID NO: 961 - DNA, 16 bp, synthetic construct
  source 1..16: mol_type = other DNA
gctaatcaaggtatca

SEQ ID NO: 962 - DNA, 16 bp, synthetic construct
  source 1..16: mol_type = other DNA
gaaacaggtatgtggg

SEQ ID NO: 963 - DNA, 16 bp, synthetic construct
  source 1..16: mol_type = other DNA
tataggtatcctgcat

SEQ ID NO: 964 - DNA, 16 bp, synthetic construct
  source 1..16: mol_type = other DNA
agacataatggtcaac

SEQ ID NO: 965 - DNA, 16 bp, synthetic construct
  source 1..16: mol_type = other DNA
cccactaaatttttcc

SEQ ID NO: 966 - DNA, 16 bp, synthetic construct
  source 1..16: mol_type = other DNA
tccttatgaccccctg

SEQ ID NO: 967 - DNA, 16 bp, synthetic construct
  source 1..16: mol_type = other DNA
catgatagtgattttc

SEQ ID NO: 968 - DNA, 16 bp, synthetic construct
  source 1..16: mol_type = other DNA
aagtttaaactgggat

SEQ ID NO: 969 - DNA, 16 bp, synthetic construct
  source 1..16: mol_type = other DNA
gagtaatatgtcagtg

SEQ ID NO: 970 - DNA, 16 bp, synthetic construct
  source 1..16: mol_type = other DNA
atgaatttagtttgat

SEQ ID NO: 971 - DNA, 16 bp, synthetic construct
  source 1..16: mol_type = other DNA
gtagtataaagaagtg

SEQ ID NO: 972 - DNA, 16 bp, synthetic construct
  source 1..16: mol_type = other DNA
acctttagacaaaggc

SEQ ID NO: 973 - DNA, 16 bp, synthetic construct
  source 1..16: mol_type = other DNA
gcagtaaaaatctcct

SEQ ID NO: 974 - DNA, 16 bp, synthetic construct
  source 1..16: mol_type = other DNA
ttaacaattcccttca

SEQ ID NO: 975 - DNA, 16 bp, synthetic construct
  source 1..16: mol_type = other DNA
agatttaggatgggag

SEQ ID NO: 976 - DNA, 16 bp, synthetic construct
  source 1..16: mol_type = other DNA
tagtaggtgatttctg

SEQ ID NO: 977 - DNA, 16 bp, synthetic construct
  source 1..16: mol_type = other DNA
gtctataaaagccaca

SEQ ID NO: 978 - DNA, 16 bp, synthetic construct
  source 1..16: mol_type = other DNA
gatataacagttctgt

SEQ ID NO: 979 - DNA, 16 bp, synthetic construct
  source 1..16: mol_type = other DNA
atgaagacagtattgc

SEQ ID NO: 980 - DNA, 16 bp, synthetic construct
  source 1..16: mol_type = other DNA
gttgataaaagcctca

SEQ ID NO: 981 - DNA, 16 bp, synthetic construct
  source 1..16: mol_type = other DNA
tctattaagcatctca

SEQ ID NO: 982 - DNA, 16 bp, synthetic construct
  source 1..16: mol_type = other DNA
acatttgaaattgacc

SEQ ID NO: 983 - DNA, 16 bp, synthetic construct
  source 1..16: mol_type = other DNA
tatcttaagtagatga

SEQ ID NO: 984 - DNA, 16 bp, synthetic construct
  source 1..16: mol_type = other DNA
agttatagtcacttcc

SEQ ID NO: 985 - DNA, 16 bp, synthetic construct
  source 1..16: mol_type = other DNA
cagtattactattaca

SEQ ID NO: 986 - DNA, 16 bp, synthetic construct
  source 1..16: mol_type = other DNA
gttaataatgaatgca

SEQ ID NO: 987 - DNA, 16 bp, synthetic construct
  source 1..16: mol_type = other DNA
gaggtaaaaatatggt

SEQ ID NO: 988 - DNA, 16 bp, synthetic construct
  source 1..16: mol_type = other DNA
tgggattaagtggagg

SEQ ID NO: 989 - DNA, 16 bp, synthetic construct
  source 1..16: mol_type = other DNA
attagttaagaccagt

SEQ ID NO: 990 - DNA, 16 bp, synthetic construct
  source 1..16: mol_type = other DNA
tgaatttgagctcatc

SEQ ID NO: 991 - DNA, 16 bp, synthetic construct
  source 1..16: mol_type = other DNA
ccattaacatactcca

SEQ ID NO: 992 - DNA, 16 bp, synthetic construct
  source 1..16: mol_type = other DNA
atggattaaactccca

SEQ ID NO: 993 - DNA, 16 bp, synthetic construct
  source 1..16: mol_type = other DNA
atgttagaaagctcgc

SEQ ID NO: 994 - DNA, 16 bp, synthetic construct
  source 1..16: mol_type = other DNA
cagctaatggagtcaa

SEQ ID NO: 995 - DNA, 16 bp, synthetic construct
  source 1..16: mol_type = other DNA
cagaatagacttggtt

SEQ ID NO: 996 - DNA, 16 bp, synthetic construct
  source 1..16: mol_type = other DNA
cataattctgggtgaa

SEQ ID NO: 997 - DNA, 16 bp, synthetic construct
  source 1..16: mol_type = other DNA
tccttaaaaacctccc

SEQ ID NO: 998 - DNA, 16 bp, synthetic construct
  source 1..16: mol_type = other DNA
gcaaaactaagaccct

SEQ ID NO: 999 - DNA, 16 bp, synthetic construct
  source 1..16: mol_type = other DNA
caatacgactgatggt

SEQ ID NO: 1000 - DNA, 16 bp, synthetic construct
  source 1..16: mol_type = other DNA
gatgatggatttctag

SEQ ID NO: 1001 - DNA, 16 bp, synthetic construct
  source 1..16: mol_type = other DNA
cactagaatagcccat

SEQ ID NO: 1002 - DNA, 16 bp, synthetic construct
  source 1..16: mol_type = other DNA
caatactacagataca

SEQ ID NO: 1003 - DNA, 16 bp, synthetic construct
  source 1..16: mol_type = other DNA
gacatatggcaccagg

SEQ ID NO: 1004 - DNA, 16 bp, synthetic construct
  source 1..16: mol_type = other DNA
ttacacataatccagg

SEQ ID NO: 1005 - DNA, 16 bp, synthetic construct
  source 1..16: mol_type = other DNA
gaacctttaaagttgt

SEQ ID NO: 1006 - DNA, 16 bp, synthetic construct
  source 1..16: mol_type = other DNA
gactctaagtaacttt

SEQ ID NO: 1007 - DNA, 16 bp, synthetic construct
  source 1..16: mol_type = other DNA
ctgcaaaagattcaca

SEQ ID NO: 1008 - DNA, 16 bp, synthetic construct
  source 1..16: mol_type = other DNA
gagtaaagtgcttcct

SEQ ID NO: 1009 - DNA, 16 bp, synthetic construct
  source 1..16: mol_type = other DNA
aagaatgtgatatgga

SEQ ID NO: 1010 - DNA, 16 bp, synthetic construct
  source 1..16: mol_type = other DNA
gcagagagttaaaagt

SEQ ID NO: 1011 - DNA, 16 bp, synthetic construct
  source 1..16: mol_type = other DNA
tacataaatgatatgg

SEQ ID NO: 1012 - DNA, 16 bp, synthetic construct
  source 1..16: mol_type = other DNA
tgatatgaatggtatg

SEQ ID NO: 1013 - DNA, 16 bp, synthetic construct
  source 1..16: mol_type = other DNA
tatctattggagaagt

SEQ ID NO: 1014 - DNA, 16 bp, synthetic construct
  source 1..16: mol_type = other DNA
tataatgtctccaggg

SEQ ID NO: 1015 - DNA, 16 bp, synthetic construct
  source 1..16: mol_type = other DNA
aagcattattgcacag

SEQ ID NO: 1016 - DNA, 16 bp, synthetic construct
  source 1..16: mol_type = other DNA
aatactccataattat

SEQ ID NO: 1017 - DNA, 16 bp, synthetic construct
  source 1..16: mol_type = other DNA
agcctaagtcttgatt

SEQ ID NO: 1018 - DNA, 16 bp, synthetic construct
  source 1..16: mol_type = other DNA
ttataggtatcctgca

SEQ ID NO: 1019 - DNA, 16 bp, synthetic construct
  source 1..16: mol_type = other DNA
gaaattacagattatg

SEQ ID NO: 1020 - DNA, 16 bp, synthetic construct
  source 1..16: mol_type = other DNA
gcagatgaggaaaaca

SEQ ID NO: 1021 - DNA, 16 bp, synthetic construct
  source 1..16: mol_type = other DNA
ataatgtcctctccat

SEQ ID NO: 1022 - DNA, 16 bp, synthetic construct
  source 1..16: mol_type = other DNA
gatgagatgagatggc

SEQ ID NO: 1023 - DNA, 16 bp, synthetic construct
  source 1..16: mol_type = other DNA
cttacataacttgcat

SEQ ID NO: 1024 - DNA, 16 bp, synthetic construct
  source 1..16: mol_type = other DNA
tgtcaatgagtagcag

SEQ ID NO: 1025 - DNA, 16 bp, synthetic construct
  source 1..16: mol_type = other DNA
aagaattagtcagcta

SEQ ID NO: 1026 - DNA, 16 bp, synthetic construct
  source 1..16: mol_type = other DNA
ctactagtttatcccc

SEQ ID NO: 1027 - DNA, 16 bp, synthetic construct
  source 1..16: mol_type = other DNA
gatttaggctttccaa

SEQ ID NO: 1028 - DNA, 16 bp, synthetic construct
  source 1..16: mol_type = other DNA
atctattaagcatctc

SEQ ID NO: 1029 - DNA, 16 bp, synthetic construct
  source 1..16: mol_type = other DNA
caatttcagaggcagc

SEQ ID NO: 1030 - DNA, 16 bp, synthetic construct
  source 1..16: mol_type = other DNA
tatatgattatgagga

SEQ ID NO: 1031 - DNA, 16 bp, synthetic construct
  source 1..16: mol_type = other DNA
atagtaggtgatttct

SEQ ID NO: 1032 - DNA, 16 bp, synthetic construct
  source 1..16: mol_type = other DNA
cagacataatggtcaa

SEQ ID NO: 1033 - DNA, 16 bp, synthetic construct
  source 1..16: mol_type = other DNA
aattatcagcaggctg

SEQ ID NO: 1034 - DNA, 16 bp, synthetic construct
  source 1..16: mol_type = other DNA
gtccaatagaagtcta

SEQ ID NO: 1035 - DNA, 16 bp, synthetic construct
  source 1..16: mol_type = other DNA
gtaacaagatttagga

SEQ ID NO: 1036 - DNA, 16 bp, synthetic construct
  source 1..16: mol_type = other DNA
tactattattcaggca

SEQ ID NO: 1037 - DNA, 16 bp, synthetic construct
  source 1..16: mol_type = other DNA
tacaatgatcagttca

SEQ ID NO: 1038 - DNA, 16 bp, synthetic construct
  source 1..16: mol_type = other DNA
tactatgatgtgttct

SEQ ID NO: 1039 - DNA, 16 bp, synthetic construct
  source 1..16: mol_type = other DNA
atagttgtacaatgta

SEQ ID NO: 1040 - DNA, 16 bp, synthetic construct
  source 1..16: mol_type = other DNA
ctctattgaacaatgc

SEQ ID NO: 1041 - DNA, 16 bp, synthetic construct
  source 1..16: mol_type = other DNA
atctattatcctcagg

SEQ ID NO: 1042 - DNA, 16 bp, synthetic construct
  source 1..16: mol_type = other DNA
attagtatcagtgtat

SEQ ID NO: 1043 - DNA, 16 bp, synthetic construct
  source 1..16: mol_type = other DNA
aagttatagtcacttc

SEQ ID NO: 1044 - DNA, 16 bp, synthetic construct
  source 1..16: mol_type = other DNA
tagcattaatgagttg

SEQ ID NO: 1045 - DNA, 16 bp, synthetic construct
  source 1..16: mol_type = other DNA
catgttagaaagctcg

SEQ ID NO: 1046 - DNA, 16 bp, synthetic construct
  source 1..16: mol_type = other DNA
acagaatagacttggt

SEQ ID NO: 1047 - DNA, 16 bp, synthetic construct
  source 1..16: mol_type = other DNA
tatctttgaagtttga

SEQ ID NO: 1048 - DNA, 16 bp, synthetic construct
  source 1..16: mol_type = other DNA
gccttaatggtcctta

SEQ ID NO: 1049 - DNA, 16 bp, synthetic construct
  source 1..16: mol_type = other DNA
tcataggtaactggga

SEQ ID NO: 1050 - DNA, 16 bp, synthetic construct
  source 1..16: mol_type = other DNA
gctttattactaatca

SEQ ID NO: 1051 - DNA, 16 bp, synthetic construct
  source 1..16: mol_type = other DNA
gaagtaagacatgctc

SEQ ID NO: 1052 - DNA, 16 bp, synthetic construct
  source 1..16: mol_type = other DNA
tcactaatgtcacatt

SEQ ID NO: 1053 - DNA, 16 bp, synthetic construct
  source 1..16: mol_type = other DNA
tttattatagggttga

SEQ ID NO: 1054 - DNA, 16 bp, synthetic construct
  source 1..16: mol_type = other DNA
acaaccataattctgg

SEQ ID NO: 1055 - DNA, 16 bp, synthetic construct
  source 1..16: mol_type = other DNA
aattagttaagaccag

SEQ ID NO: 1056 - DNA, 16 bp, synthetic construct
  source 1..16: mol_type = other DNA
atccttaaaaacctcc

SEQ ID NO: 1057 - DNA, 16 bp, synthetic construct
  source 1..16: mol_type = other DNA
ttgtaatagtggtgtg

SEQ ID NO: 1058 - DNA, 16 bp, synthetic construct
  source 1..16: mol_type = other DNA
tcaaaatcttgtcctg

SEQ ID NO: 1059 - DNA, 16 bp, synthetic construct
  source 1..16: mol_type = other DNA
gttacatatctacatt

SEQ ID NO: 1060 - DNA, 16 bp, synthetic construct
  source 1..16: mol_type = other DNA
gatattgtataaggtt

SEQ ID NO: 1061 - DNA, 16 bp, synthetic construct
  source 1..16: mol_type = other DNA
gctaaaattctacttc

SEQ ID NO: 1062 - DNA, 16 bp, synthetic construct
  source 1..16: mol_type = other DNA
gcttatttggagtggt

SEQ ID NO: 1063 - DNA, 16 bp, synthetic construct
  source 1..16: mol_type = other DNA
aagtaatgggtggtca

SEQ ID NO: 1064 - DNA, 16 bp, synthetic construct
  source 1..16: mol_type = other DNA
aaaaccagtaacatcc

SEQ ID NO: 1065 - DNA, 16 bp, synthetic construct
  source 1..16: mol_type = other DNA
gcagtaagtgaaatct

SEQ ID NO: 1066 - DNA, 16 bp, synthetic construct
  source 1..16: mol_type = other DNA
gttaacaattcccttc

SEQ ID NO: 1067 - DNA, 16 bp, synthetic construct
  source 1..16: mol_type = other DNA
gcctataatctactga

SEQ ID NO: 1068 - DNA, 16 bp, synthetic construct
  source 1..16: mol_type = other DNA
tttacatatatccctc

SEQ ID NO: 1069 - DNA, 16 bp, synthetic construct
  source 1..16: mol_type = other DNA
catgattaaaagtgta

SEQ ID NO: 1070 - DNA, 16 bp, synthetic construct
  source 1..16: mol_type = other DNA
tacatttaatgcctac

SEQ ID NO: 1071 - DNA, 16 bp, synthetic construct
  source 1..16: mol_type = other DNA
gctataagggtctcaa

SEQ ID NO: 1072 - DNA, 16 bp, synthetic construct
  source 1..16: mol_type = other DNA
gaaattcatttgtgac

SEQ ID NO: 1073 - DNA, 16 bp, synthetic construct
  source 1..16: mol_type = other DNA
aatacctcaatgtcca

SEQ ID NO: 1074 - DNA, 16 bp, synthetic construct
  source 1..16: mol_type = other DNA
tagaatggatgtcatt

SEQ ID NO: 1075 - DNA, 16 bp, synthetic construct
  source 1..16: mol_type = other DNA
ccaatacgactgatgg

SEQ ID NO: 1076 - DNA, 16 bp, synthetic construct
  source 1..16: mol_type = other DNA
gcaatactacagatac

SEQ ID NO: 1077 - DNA, 16 bp, synthetic construct
  source 1..16: mol_type = other DNA
cacgagagtggtttga

SEQ ID NO: 1078 - DNA, 16 bp, synthetic construct
  source 1..16: mol_type = other DNA
ccctattttgctccat

SEQ ID NO: 1079 - DNA, 16 bp, synthetic construct
  source 1..16: mol_type = other DNA
cccaaacaaggcagag

SEQ ID NO: 1080 - DNA, 16 bp, synthetic construct
  source 1..16: mol_type = other DNA
cactaattactttcac

SEQ ID NO: 1081 - DNA, 16 bp, synthetic construct
  source 1..16: mol_type = other DNA
cacaagaccactgcac

SEQ ID NO: 1082 - DNA, 16 bp, synthetic construct
  source 1..16: mol_type = other DNA
aataattcttagaagg

SEQ ID NO: 1083 - DNA, 16 bp, synthetic construct
  source 1..16: mol_type = other DNA
ctgaaagaggtatttc

SEQ ID NO: 1084 - DNA, 16 bp, synthetic construct
  source 1..16: mol_type = other DNA
ccagaaagcaatctcc

SEQ ID NO: 1085 - DNA, 16 bp, synthetic construct
  source 1..16: mol_type = other DNA
gcataaactcttggcc

SEQ ID NO: 1086 - DNA, 16 bp, synthetic construct
  source 1..16: mol_type = other DNA
caatttggtggtccac

SEQ ID NO: 1087 - DNA, 16 bp, synthetic construct
  source 1..16: mol_type = other DNA
catatgtagagtaaga

SEQ ID NO: 1088 - DNA, 16 bp, synthetic construct
  source 1..16: mol_type = other DNA
acacagtacactgcaa

SEQ ID NO: 1089 - DNA, 16 bp, synthetic construct
  source 1..16: mol_type = other DNA
attagtatgtccacct

SEQ ID NO: 1090 - DNA, 16 bp, synthetic construct
  source 1..16: mol_type = other DNA
gtgatatgaatggtat

SEQ ID NO: 1091 - DNA, 16 bp, synthetic construct
  source 1..16: mol_type = other DNA
atatctattggagaag

SEQ ID NO: 1092 - DNA, 16 bp, synthetic construct
  source 1..16: mol_type = other DNA
gtacacagcaaatact

SEQ ID NO: 1093 - DNA, 16 bp, synthetic construct
  source 1..16: mol_type = other DNA
ttctatcattgcagtt

SEQ ID NO: 1094 - DNA, 16 bp, synthetic construct
  source 1..16: mol_type = other DNA
gcttaatacctcaatg

SEQ ID NO: 1095 - DNA, 16 bp, synthetic construct
  source 1..16: mol_type = other DNA
catgaagagggaaatt

SEQ ID NO: 1096 - DNA, 16 bp, synthetic construct
  source 1..16: mol_type = other DNA
aatttagtgaataatg

SEQ ID NO: 1097 - DNA, 16 bp, synthetic construct
  source 1..16: mol_type = other DNA
caaaccagctgatgag

SEQ ID NO: 1098 - DNA, 16 bp, synthetic construct
  source 1..16: mol_type = other DNA
taaaaactttcctccg

SEQ ID NO: 1099 - DNA, 16 bp, synthetic construct
  source 1..16: mol_type = other DNA
cattttgagattcctg

SEQ ID NO: 1100 - DNA, 16 bp, synthetic construct
  source 1..16: mol_type = other DNA
gatctattatcctcag

SEQ ID NO: 1101 - DNA, 16 bp, synthetic construct
  source 1..16: mol_type = other DNA
gaactagtttgcttcc

SEQ ID NO: 1102 - DNA, 16 bp, synthetic construct
  source 1..16: mol_type = other DNA
tatagtaggtgatttc

SEQ ID NO: 1103 - DNA, 16 bp, synthetic construct
  source 1..16: mol_type = other DNA
aagtagttaaggctac

SEQ ID NO: 1104 - DNA, 16 bp, synthetic construct
  source 1..16: mol_type = other DNA
catactaatgattcag

SEQ ID NO: 1105 - DNA, 16 bp, synthetic construct
  source 1..16: mol_type = other DNA
ccaaatttggtaaggt

SEQ ID NO: 1106 - DNA, 16 bp, synthetic construct
  source 1..16: mol_type = other DNA
acaatatctacaagtc

SEQ ID NO: 1107 - DNA, 16 bp, synthetic construct
  source 1..16: mol_type = other DNA
gacaataatgcaatgt

SEQ ID NO: 1108 - DNA, 16 bp, synthetic construct
  source 1..16: mol_type = other DNA
ctcataggtaactggg

SEQ ID NO: 1109 - DNA, 16 bp, synthetic construct
  source 1..16: mol_type = other DNA
gtatttaatgagctcc

SEQ ID NO: 1110 - DNA, 16 bp, synthetic construct
  source 1..16: mol_type = other DNA
aatgattagggtcact

SEQ ID NO: 1111 - DNA, 16 bp, synthetic construct
  source 1..16: mol_type = other DNA
ttcgagtaaatgctaa

SEQ ID NO: 1112 - DNA, 16 bp, synthetic construct
  source 1..16: mol_type = other DNA
ccaaattatcagcagg

SEQ ID NO: 1113 - DNA, 16 bp, synthetic construct
  source 1..16: mol_type = other DNA
ctttagatttaggctt

SEQ ID NO: 1114 - DNA, 16 bp, synthetic construct
  source 1..16: mol_type = other DNA
gttacaatgatcagtt

SEQ ID NO: 1115 - DNA, 16 bp, synthetic construct
  source 1..16: mol_type = other DNA
taaaacatgtgagtcc

SEQ ID NO: 1116 - DNA, 16 bp, synthetic construct
  source 1..16: mol_type = other DNA
cactaacaattctttc

SEQ ID NO: 1117 - DNA, 16 bp, synthetic construct
  source 1..16: mol_type = other DNA
gtaagataagcattgt

SEQ ID NO: 1118 - DNA, 16 bp, synthetic construct
  source 1..16: mol_type = other DNA
cacattagagaatgta

SEQ ID NO: 1119 - DNA, 16 bp, synthetic construct
  source 1..16: mol_type = other DNA
ctcaatgaggttcaca

SEQ ID NO: 1120 - DNA, 16 bp, synthetic construct
  source 1..16: mol_type = other DNA
tcagaagtggtagtat

SEQ ID NO: 1121 - DNA, 16 bp, synthetic construct
  source 1..16: mol_type = other DNA
atcaaaatcttgtcct

SEQ ID NO: 1122 - DNA, 16 bp, synthetic construct
  source 1..16: mol_type = other DNA
tcaataaacagtacca

SEQ ID NO: 1123 - DNA, 16 bp, synthetic construct
  source 1..16: mol_type = other DNA
agtttaactaggcatc

SEQ ID NO: 1124 - DNA, 16 bp, synthetic construct
  source 1..16: mol_type = other DNA
agtacaaactgctaca

SEQ ID NO: 1125 - DNA, 16 bp, synthetic construct
  source 1..16: mol_type = other DNA
gactagctgaagttgc

SEQ ID NO: 1126 - DNA, 16 bp, synthetic construct
  source 1..16: mol_type = other DNA
tctatagagaaccaga

SEQ ID NO: 1127 - DNA, 16 bp, synthetic construct
  source 1..16: mol_type = other DNA
ccacattcaagcttcg

SEQ ID NO: 1128 - DNA, 16 bp, synthetic construct
  source 1..16: mol_type = other DNA
cctacaaaaaccacca

SEQ ID NO: 1129 - DNA, 16 bp, synthetic construct
  source 1..16: mol_type = other DNA
gcagattcaaagaggg

SEQ ID NO: 1130 - DNA, 16 bp, synthetic construct
  source 1..16: mol_type = other DNA
gaattagtatcagtgt

SEQ ID NO: 1131 - DNA, 16 bp, synthetic construct
  source 1..16: mol_type = other DNA
tactatattggttacc

SEQ ID NO: 1132 - DNA, 16 bp, synthetic construct
  source 1..16: mol_type = other DNA
tttaatgggtgattgc

SEQ ID NO: 1133 - DNA, 16 bp, synthetic construct
  source 1..16: mol_type = other DNA
tggaagtaagacatgc

SEQ ID NO: 1134 - DNA, 16 bp, synthetic construct
  source 1..16: mol_type = other DNA
cttataggtatcctgc

SEQ ID NO: 1135 - DNA, 16 bp, synthetic construct
  source 1..16: mol_type = other DNA
taccatcaaagaagga

SEQ ID NO: 1136 - DNA, 16 bp, synthetic construct
  source 1..16: mol_type = other DNA
ttcaataagcgggctg

SEQ ID NO: 1137 - DNA, 16 bp, synthetic construct
  source 1..16: mol_type = other DNA
agtcaaaatgcccata

SEQ ID NO: 1138 - DNA, 16 bp, synthetic construct
  source 1..16: mol_type = other DNA
ataagtatcacagtca

SEQ ID NO: 1139 - DNA, 16 bp, synthetic construct
  source 1..16: mol_type = other DNA
gtataatgtctccagg

SEQ ID NO: 1140 - DNA, 16 bp, synthetic construct
  source 1..16: mol_type = other DNA
atgtactaaacacagg

SEQ ID NO: 1141 - DNA, 16 bp, synthetic construct
  source 1..16: mol_type = other DNA
agctatatcacttgaa

SEQ ID NO: 1142 - DNA, 16 bp, synthetic construct
  source 1..16: mol_type = other DNA
gacaatcggaactccc

SEQ ID NO: 1143 - DNA, 16 bp, synthetic construct
  source 1..16: mol_type = other DNA
tgctataagggtctca

SEQ ID NO: 1144 - DNA, 16 bp, synthetic construct
  source 1..16: mol_type = other DNA
caagtaatgggtggtc

SEQ ID NO: 1145 - DNA, 16 bp, synthetic construct
  source 1..16: mol_type = other DNA
aacagaatagacttgg

SEQ ID NO: 1146 - DNA, 16 bp, synthetic construct
  source 1..16: mol_type = other DNA
accaataacatgtcaa

SEQ ID NO: 1147 - DNA, 16 bp, synthetic construct
  source 1..16: mol_type = other DNA
gaattagttaagacca

SEQ ID NO: 1148 - DNA, 16 bp, synthetic construct
  source 1..16: mol_type = other DNA
tcaatttaaggaaagg

SEQ ID NO: 1149 - DNA, 16 bp, synthetic construct
  source 1..16: mol_type = other DNA
gtagaaatccaacttc

SEQ ID NO: 1150 - DNA, 16 bp, synthetic construct
  source 1..16: mol_type = other DNA
ctacatattatgtctg

SEQ ID NO: 1151 - DNA, 16 bp, synthetic construct
  source 1..16: mol_type = other DNA
atatttcaatctcagg

SEQ ID NO: 1152 - DNA, 16 bp, synthetic construct
  source 1..16: mol_type = other DNA
accacgagagtggttt

SEQ ID NO: 1153 - DNA, 16 bp, synthetic construct
  source 1..16: mol_type = other DNA
taagaagcattattgc

SEQ ID NO: 1154 - DNA, 16 bp, synthetic construct
  source 1..16: mol_type = other DNA
acatatgtagagtaag

SEQ ID NO: 1155 - DNA, 16 bp, synthetic construct
  source 1..16: mol_type = other DNA
ccatattctggaaatt

SEQ ID NO: 1156 - DNA, 16 bp, synthetic construct
  source 1..16: mol_type = other DNA
ttccaatacgactgat

SEQ ID NO: 1157 - DNA, 16 bp, synthetic construct
  source 1..16: mol_type = other DNA
tagcataaactcttgg

SEQ ID NO: 1158 - DNA, 16 bp, synthetic construct
  source 1..16: mol_type = other DNA
aaaatgatgcacacca

SEQ ID NO: 1159 - DNA, 16 bp, synthetic construct
  source 1..16: mol_type = other DNA
ctgcaatactacagat

SEQ ID NO: 1160 - DNA, 16 bp, synthetic construct
  source 1..16: mol_type = other DNA
gcatagagggtcttgt

SEQ ID NO: 1161 - DNA, 16 bp, synthetic construct
  source 1..16: mol_type = other DNA
aaaccctattttgctc

SEQ ID NO: 1162 - DNA, 16 bp, synthetic construct
  source 1..16: mol_type = other DNA
cacaataattcttaga

SEQ ID NO: 1163 - DNA, 16 bp, synthetic construct
  source 1..16: mol_type = other DNA
tacccaaacaaggcag

SEQ ID NO: 1164 - DNA, 16 bp, synthetic construct
  source 1..16: mol_type = other DNA
gaacaggtttccagta

SEQ ID NO: 1165 - DNA, 16 bp, synthetic construct
  source 1..16: mol_type = other DNA
ccaaattacagggagc

SEQ ID NO: 1166 - DNA, 16 bp, synthetic construct
  source 1..16: mol_type = other DNA
tattagtatgtccacc

SEQ ID NO: 1167 - DNA, 16 bp, synthetic construct
  source 1..16: mol_type = other DNA
aagtgatatgaatggt

SEQ ID NO: 1168 - DNA, 16 bp, synthetic construct
  source 1..16: mol_type = other DNA
aatatctattggagaa

SEQ ID NO: 1169 - DNA, 16 bp, synthetic construct
  source 1..16: mol_type = other DNA
tattaagaagcattat

SEQ ID NO: 1170 - DNA, 16 bp, synthetic construct
  source 1..16: mol_type = other DNA
aatagctatcaggctc

SEQ ID NO: 1171 - DNA, 16 bp, synthetic construct
  source 1..16: mol_type = other DNA
gcaatattgggtacac

SEQ ID NO: 1172 - DNA, 16 bp, synthetic construct
  source 1..16: mol_type = other DNA
tgtatatcctttgttc

SEQ ID NO: 1173 - DNA, 16 bp, synthetic construct
  source 1..16: mol_type = other DNA
attctaacacttgggc

SEQ ID NO: 1174 - DNA, 16 bp, synthetic construct
  source 1..16: mol_type = other DNA
aaaccgactggtctca

SEQ ID NO: 1175 - DNA, 16 bp, synthetic construct
  source 1..16: mol_type = other DNA
ttgaattacacaaacc

SEQ ID NO: 1176 - DNA, 16 bp, synthetic construct
  source 1..16: mol_type = other DNA
actacaacaatatcta

SEQ ID NO: 1177 - DNA, 16 bp, synthetic construct
  source 1..16: mol_type = other DNA
tcttataggtatcctg

SEQ ID NO: 1178 - DNA, 16 bp, synthetic construct
  source 1..16: mol_type = other DNA
tacataacatgacaca

SEQ ID NO: 1179 - DNA, 16 bp, synthetic construct
  source 1..16: mol_type = other DNA
aatattgattacctgc

SEQ ID NO: 1180 - DNA, 16 bp, synthetic construct
  source 1..16: mol_type = other DNA
acaaatcctgctttgc

SEQ ID NO: 1181 - DNA, 16 bp, synthetic construct
  source 1..16: mol_type = other DNA
atcaagtaatgggtgg

SEQ ID NO: 1182 - DNA, 16 bp, synthetic construct
  source 1..16: mol_type = other DNA
tagtatagtaggtgat

SEQ ID NO: 1183 - DNA, 16 bp, synthetic construct
  source 1..16: mol_type = other DNA
aagattattcctcaag

SEQ ID NO: 1184 - DNA, 16 bp, synthetic construct
  source 1..16: mol_type = other DNA
gcaaatgaagatatgt

SEQ ID NO: 1185 - DNA, 16 bp, synthetic construct
  source 1..16: mol_type = other DNA
attatgaagagttcga

SEQ ID NO: 1186 - DNA, 16 bp, synthetic construct
  source 1..16: mol_type = other DNA
ccattgaaggctttgt

SEQ ID NO: 1187 - DNA, 16 bp, synthetic construct
  source 1..16: mol_type = other DNA
ctagagaagttcttcc

SEQ ID NO: 1188 - DNA, 16 bp, synthetic construct
  source 1..16: mol_type = other DNA
catacgccaagctcaa

SEQ ID NO: 1189 - DNA, 16 bp, synthetic construct
  source 1..16: mol_type = other DNA
acaattaatatgcagc

SEQ ID NO: 1190 - DNA, 16 bp, synthetic construct
  source 1..16: mol_type = other DNA
gacataagctggaaca

SEQ ID NO: 1191 - DNA, 16 bp, synthetic construct
  source 1..16: mol_type = other DNA
gtctaaaaacaacagt

SEQ ID NO: 1192 - DNA, 16 bp, synthetic construct
  source 1..16: mol_type = other DNA
caaatcagaagtggta

SEQ ID NO: 1193 - DNA, 16 bp, synthetic construct
  source 1..16: mol_type = other DNA
catcaaaatcttgtcc

SEQ ID NO: 1194 - DNA, 16 bp, synthetic construct
  source 1..16: mol_type = other DNA
attagtacaatcatcc

SEQ ID NO: 1195 - DNA, 16 bp, synthetic construct
  source 1..16: mol_type = other DNA
aagtttaactaggcat

SEQ ID NO: 1196 - DNA, 16 bp, synthetic construct
  source 1..16: mol_type = other DNA
catactatattggtta

SEQ ID NO: 1197 - DNA, 16 bp, synthetic construct
  source 1..16: mol_type = other DNA
actagaaaagctgctt

SEQ ID NO: 1198 - DNA, 16 bp, synthetic construct
  source 1..16: mol_type = other DNA
ctttatcttaacttgg

SEQ ID NO: 1199 - DNA, 16 bp, synthetic construct
  source 1..16: mol_type = other DNA
ttgaattagtatcagt

SEQ ID NO: 1200 - DNA, 16 bp, synthetic construct
  source 1..16: mol_type = other DNA
aaaagtttgtcactca

SEQ ID NO: 1201 - DNA, 16 bp, synthetic construct
  source 1..16: mol_type = other DNA
catgtaaatacagtgc

SEQ ID NO: 1202 - DNA, 16 bp, synthetic construct
  source 1..16: mol_type = other DNA
cagactaaaatgatca

SEQ ID NO: 1203 - DNA, 16 bp, synthetic construct
  source 1..16: mol_type = other DNA
ataacttttctttggg

SEQ ID NO: 1204 - DNA, 16 bp, synthetic construct
  source 1..16: mol_type = other DNA
gaattttatcagacta

SEQ ID NO: 1205 - DNA, 16 bp, synthetic construct
  source 1..16: mol_type = other DNA
gtatactatctaggtt

SEQ ID NO: 1206 - DNA, 16 bp, synthetic construct
  source 1..16: mol_type = other DNA
agtcaatgattagggt

SEQ ID NO: 1207 - DNA, 16 bp, synthetic construct
  source 1..16: mol_type = other DNA
ttctagatagtttgta

SEQ ID NO: 1208 - DNA, 16 bp, synthetic construct
  source 1..16: mol_type = other DNA
agctttagatttaggc

SEQ ID NO: 1209 - DNA, 16 bp, synthetic construct
  source 1..16: mol_type = other DNA
acatactaatgattca

SEQ ID NO: 1210 - DNA, 16 bp, synthetic construct
  source 1..16: mol_type = other DNA
atatttctcatatcga

SEQ ID NO: 1211 - DNA, 16 bp, synthetic construct
  source 1..16: mol_type = other DNA
tgttaagatacattcc

SEQ ID NO: 1212 - DNA, 16 bp, synthetic construct
  source 1..16: mol_type = other DNA
gaatttcacactgcta

SEQ ID NO: 1213 - DNA, 16 bp, synthetic construct
  source 1..16: mol_type = other DNA
cccaaattatcagcag

SEQ ID NO: 1214 - DNA, 16 bp, synthetic construct
  source 1..16: mol_type = other DNA
gtttatgaaaatctcc

SEQ ID NO: 1215 - DNA, 16 bp, synthetic construct
  source 1..16: mol_type = other DNA
tttcatacaaagctgg

SEQ ID NO: 1216 - DNA, 16 bp, synthetic construct
  source 1..16: mol_type = other DNA
aagaattatgacacca

SEQ ID NO: 1217 - DNA, 16 bp, synthetic construct
  source 1..16: mol_type = other DNA
gctaagctcattgtct

SEQ ID NO: 1218 - DNA, 16 bp, synthetic construct
  source 1..16: mol_type = other DNA
agttttagaacataga

SEQ ID NO: 1219 - DNA, 16 bp, synthetic construct
  source 1..16: mol_type = other DNA
aagtagaaatccaact

SEQ ID NO: 1220 - DNA, 16 bp, synthetic construct
  source 1..16: mol_type = other DNA
tgaattagttaagacc

SEQ ID NO: 1221 - DNA, 16 bp, synthetic construct
  source 1..16: mol_type = other DNA
taagattctagctaga

SEQ ID NO: 1222 - DNA, 16 bp, synthetic construct
  source 1..16: mol_type = other DNA
caccaataacatgtca

SEQ ID NO: 1223 - DNA, 16 bp, synthetic construct
  source 1..16: mol_type = other DNA
ttgaagagcattctcc

SEQ ID NO: 1224 - DNA, 16 bp, synthetic construct
  source 1..16: mol_type = other DNA
gttgaatagatagccc

SEQ ID NO: 1225 - DNA, 16 bp, synthetic construct
  source 1..16: mol_type = other DNA
gcactaacaattcttt

SEQ ID NO: 1226 - DNA, 16 bp, synthetic construct
  source 1..16: mol_type = other DNA
gatttatcgatgtcac

SEQ ID NO: 1227 - DNA, 16 bp, synthetic construct
  source 1..16: mol_type = other DNA
attactaatgtttacc

SEQ ID NO: 1228 - DNA, 16 bp, synthetic construct
  source 1..16: mol_type = other DNA
tctaaacttgaactgg

SEQ ID NO: 1229 - DNA, 16 bp, synthetic construct
  source 1..16: mol_type = other DNA
tcaaatggttaaggcc

SEQ ID NO: 1230 - DNA, 16 bp, synthetic construct
  source 1..16: mol_type = other DNA
tagtagtacttccaat

SEQ ID NO: 1231 - DNA, 16 bp, synthetic construct
  source 1..16: mol_type = other DNA
agtaagaggctggaca

SEQ ID NO: 1232 - DNA, 16 bp, synthetic construct
  source 1..16: mol_type = other DNA
cccaaattacagggag

SEQ ID NO: 1233 - DNA, 16 bp, synthetic construct
  source 1..16: mol_type = other DNA
gattaggataacagtt

SEQ ID NO: 1234 - DNA, 16 bp, synthetic construct
  source 1..16: mol_type = other DNA
aaaaccctattttgct

SEQ ID NO: 1235 - DNA, 16 bp, synthetic construct
  source 1..16: mol_type = other DNA
ccatagcataaactct

SEQ ID NO: 1236 - DNA, 16 bp, synthetic construct
  source 1..16: mol_type = other DNA
aacaatggcaggtgac

SEQ ID NO: 1237 - DNA, 16 bp, synthetic construct
  source 1..16: mol_type = other DNA
ttcaaaagaagaccac

SEQ ID NO: 1238 - DNA, 16 bp, synthetic construct
  source 1..16: mol_type = other DNA
tttacccaaacaaggc

SEQ ID NO: 1239 - DNA, 16 bp, synthetic construct
  source 1..16: mol_type = other DNA
gaaaatgatgcacacc

SEQ ID NO: 1240 - DNA, 16 bp, synthetic construct
  source 1..16: mol_type = other DNA
caagcgagtacggatg

SEQ ID NO: 1241 - DNA, 16 bp, synthetic construct
  source 1..16: mol_type = other DNA
cagttaacagcgcggt

SEQ ID NO: 1242 - DNA, 16 bp, synthetic construct
  source 1..16: mol_type = other DNA
cacatatgtagagtaa

SEQ ID NO: 1243 - DNA, 16 bp, synthetic construct
  source 1..16: mol_type = other DNA
attaaaagacggcctc

SEQ ID NO: 1244 - DNA, 16 bp, synthetic construct
  source 1..16: mol_type = other DNA
ttattagtatgtccac

SEQ ID NO: 1245 - DNA, 16 bp, synthetic construct
  source 1..16: mol_type = other DNA
aaagtgatatgaatgg

SEQ ID NO: 1246 - DNA, 16 bp, synthetic construct
  source 1..16: mol_type = other DNA
gtattaagaagcatta

SEQ ID NO: 1247 - DNA, 16 bp, synthetic construct
  source 1..16: mol_type = other DNA
agcaatggtatctggg

SEQ ID NO: 1248 - DNA, 16 bp, synthetic construct
  source 1..16: mol_type = other DNA
gcaatgactagcaata

SEQ ID NO: 1249 - DNA, 16 bp, synthetic construct
  source 1..16: mol_type = other DNA
taggcgagaacacact

SEQ ID NO: 1250 - DNA, 16 bp, synthetic construct
  source 1..16: mol_type = other DNA
gttaaactacttgaat

SEQ ID NO: 1251 - DNA, 16 bp, synthetic construct
  source 1..16: mol_type = other DNA
aagatatacaacactc

SEQ ID NO: 1252 - DNA, 16 bp, synthetic construct
  source 1..16: mol_type = other DNA
gcaaattgtgttcagt

SEQ ID NO: 1253 - DNA, 16 bp, synthetic construct
  source 1..16: mol_type = other DNA
atgtaagatgtctggc

SEQ ID NO: 1254 - DNA, 16 bp, synthetic construct
  source 1..16: mol_type = other DNA
ctacatcaaaatcttg

SEQ ID NO: 1255 - DNA, 16 bp, synthetic construct
  source 1..16: mol_type = other DNA
ccatactatattggtt

SEQ ID NO: 1256 - DNA, 16 bp, synthetic construct
  source 1..16: mol_type = other DNA
aagctttagatttagg

SEQ ID NO: 1257 - DNA, 16 bp, synthetic construct
  source 1..16: mol_type = other DNA
gcataaatgatccagg

SEQ ID NO: 1258 - DNA, 16 bp, synthetic construct
  source 1..16: mol_type = other DNA
ttttatccagatttgc

SEQ ID NO: 1259 - DNA, 16 bp, synthetic construct
  source 1..16: mol_type = other DNA
tagctaagctcattgt

SEQ ID NO: 1260 - DNA, 16 bp, synthetic construct
  source 1..16: mol_type = other DNA
ccagaacagacatctg

SEQ ID NO: 1261 - DNA, 16 bp, synthetic construct
  source 1..16: mol_type = other DNA
gaagtagaaatccaac

SEQ ID NO: 1262 - DNA, 16 bp, synthetic construct
  source 1..16: mol_type = other DNA
gcaaatgctatgacaa

SEQ ID NO: 1263 - DNA, 16 bp, synthetic construct
  source 1..16: mol_type = other DNA
catactaagattggca

SEQ ID NO: 1264 - DNA, 16 bp, synthetic construct
  source 1..16: mol_type = other DNA
aggataaaagtttgtc

SEQ ID NO: 1265 - DNA, 16 bp, synthetic construct
  source 1..16: mol_type = other DNA
ctatttgaaagtgctg

SEQ ID NO: 1266 - DNA, 16 bp, synthetic construct
  source 1..16: mol_type = other DNA
gaaaatttgcagcagg

SEQ ID NO: 1267 - DNA, 16 bp, synthetic construct
  source 1..16: mol_type = other DNA
ttcttataggtatcct

SEQ ID NO: 1268 - DNA, 16 bp, synthetic construct
  source 1..16: mol_type = other DNA
gaattacaatgttcta

SEQ ID NO: 1269 - DNA, 16 bp, synthetic construct
  source 1..16: mol_type = other DNA
gaatttatctaccttg

SEQ ID NO: 1270 - DNA, 16 bp, synthetic construct
  source 1..16: mol_type = other DNA
tagaattttatcagac

SEQ ID NO: 1271 - DNA, 16 bp, synthetic construct
  source 1..16: mol_type = other DNA
aagctacgatctctca

SEQ ID NO: 1272 - DNA, 16 bp, synthetic construct
  source 1..16: mol_type = other DNA
tattatgaagagttcg

SEQ ID NO: 1273 - DNA, 16 bp, synthetic construct
  source 1..16: mol_type = other DNA
agttaggtttacgctg

SEQ ID NO: 1274 - DNA, 16 bp, synthetic construct
  source 1..16: mol_type = other DNA
gcaaatattgattacc

SEQ ID NO: 1275 - DNA, 16 bp, synthetic construct
  source 1..16: mol_type = other DNA
gaatttctctgatatc

SEQ ID NO: 1276 - DNA, 16 bp, synthetic construct
  source 1..16: mol_type = other DNA
cacaaattactgttcc

SEQ ID NO: 1277 - DNA, 16 bp, synthetic construct
  source 1..16: mol_type = other DNA
gtaacttagattccag

SEQ ID NO: 1278 - DNA, 16 bp, synthetic construct
  source 1..16: mol_type = other DNA
tcagtaatttagggta

SEQ ID NO: 1279 - DNA, 16 bp, synthetic construct
  source 1..16: mol_type = other DNA
gctttatcaagatcca

SEQ ID NO: 1280 - DNA, 16 bp, synthetic construct
  source 1..16: mol_type = other DNA
gcacagaggtcatcta

SEQ ID NO: 1281 - DNA, 16 bp, synthetic construct
  source 1..16: mol_type = other DNA
aaccatgagaatttca

SEQ ID NO: 1282 - DNA, 16 bp, synthetic construct
  source 1..16: mol_type = other DNA
atagttacagctgtgc

SEQ ID NO: 1283 - DNA, 16 bp, synthetic construct
  source 1..16: mol_type = other DNA
gagattaaagttctca

SEQ ID NO: 1284 - DNA, 16 bp, synthetic construct
  source 1..16: mol_type = other DNA
ataagattattcctca

SEQ ID NO: 1285 - DNA, 16 bp, synthetic construct
  source 1..16: mol_type = other DNA
gctatacatgatctta

SEQ ID NO: 1286 - DNA, 16 bp, synthetic construct
  source 1..16: mol_type = other DNA
gttagttagaagcaca

SEQ ID NO: 1287 - DNA, 16 bp, synthetic construct
  source 1..16: mol_type = other DNA
ccatttacaactatgg

SEQ ID NO: 1288 - DNA, 16 bp, synthetic construct
  source 1..16: mol_type = other DNA
ataacatcaaggtgca

SEQ ID NO: 1289 - DNA, 16 bp, synthetic construct
  source 1..16: mol_type = other DNA
tttagtatagtaggtg

SEQ ID NO: 1290 - DNA, 16 bp, synthetic construct
  source 1..16: mol_type = other DNA
gctatagaaactgccc

SEQ ID NO: 1291 - DNA, 16 bp, synthetic construct
  source 1..16: mol_type = other DNA
tggtattatggaaggt

SEQ ID NO: 1292 - DNA, 16 bp, synthetic construct
  source 1..16: mol_type = other DNA
gcagtaattttattcc

SEQ ID NO: 1293 - DNA, 16 bp, synthetic construct
  source 1..16: mol_type = other DNA
gaattcattagtctta

SEQ ID NO: 1294 - DNA, 16 bp, synthetic construct
  source 1..16: mol_type = other DNA
tcaaatcagaagtggt

SEQ ID NO: 1295 - DNA, 16 bp, synthetic construct
  source 1..16: mol_type = other DNA
catagaatagtcttgc

SEQ ID NO: 1296 - DNA, 16 bp, synthetic construct
  source 1..16: mol_type = other DNA
gaaattagcaggccaa

SEQ ID NO: 1297 - DNA, 16 bp, synthetic construct
  source 1..16: mol_type = other DNA
gcaaatcagtgactgt

SEQ ID NO: 1298 - DNA, 16 bp, synthetic construct
  source 1..16: mol_type = other DNA
actatagaatctcact

SEQ ID NO: 1299 - DNA, 16 bp, synthetic construct
  source 1..16: mol_type = other DNA
gatacattaatttcca

SEQ ID NO: 1300 - DNA, 16 bp, synthetic construct
  source 1..16: mol_type = other DNA
gatttaaataaggcca

SEQ ID NO: 1301 - DNA, 16 bp, synthetic construct
  source 1..16: mol_type = other DNA
tataggtcatgacatt

SEQ ID NO: 1302 - DNA, 16 bp, synthetic construct
  source 1..16: mol_type = other DNA
tagtattatgcagcat

SEQ ID NO: 1303 - DNA, 16 bp, synthetic construct
  source 1..16: mol_type = other DNA
cattatctatgtcagc

SEQ ID NO: 1304 - DNA, 16 bp, synthetic construct
  source 1..16: mol_type = other DNA
tgttatactgatgggc

SEQ ID NO: 1305 - DNA, 16 bp, synthetic construct
  source 1..16: mol_type = other DNA
agctttaaagagccac

SEQ ID NO: 1306 - DNA, 16 bp, synthetic construct
  source 1..16: mol_type = other DNA
agcaatcagaagttcc

SEQ ID NO: 1307 - DNA, 16 bp, synthetic construct
  source 1..16: mol_type = other DNA
gacaagatggctcctg

SEQ ID NO: 1308 - DNA, 16 bp, synthetic construct
  source 1..16: mol_type = other DNA
ttggaaaatgatgcac

SEQ ID NO: 1309 - DNA, 16 bp, synthetic construct
  source 1..16: mol_type = other DNA
gatcttgaaaaaccct

SEQ ID NO: 1310 - DNA, 16 bp, synthetic construct
  source 1..16: mol_type = other DNA
cagtaagaggctggac

SEQ ID NO: 1311 - DNA, 16 bp, synthetic construct
  source 1..16: mol_type = other DNA
atactttagtgcttgt

SEQ ID NO: 1312 - DNA, 16 bp, synthetic construct
  source 1..16: mol_type = other DNA
ctttacccaaacaagg

SEQ ID NO: 1313 - DNA, 16 bp, synthetic construct
  source 1..16: mol_type = other DNA
ttcaaatggttaaggc

SEQ ID NO: 1314 - DNA, 16 bp, synthetic construct
  source 1..16: mol_type = other DNA
aaatagctatcaggct

SEQ ID NO: 1315 - DNA, 16 bp, synthetic construct
  source 1..16: mol_type = other DNA
agattaggataacagt

SEQ ID NO: 1316 - DNA, 16 bp, synthetic construct
  source 1..16: mol_type = other DNA
acacatatgtagagta

SEQ ID NO: 1317 - DNA, 16 bp, synthetic construct
  source 1..16: mol_type = other DNA
caacaatggcaggtga

SEQ ID NO: 1318 - DNA, 16 bp, synthetic construct
  source 1..16: mol_type = other DNA
ggttagtagtacttcc

SEQ ID NO: 1319 - DNA, 16 bp, synthetic construct
  source 1..16: mol_type = other DNA
actaagactgcacagg

SEQ ID NO: 1320 - DNA, 16 bp, synthetic construct
  source 1..16: mol_type = other DNA
aattaaaagacggcct

SEQ ID NO: 1321 - DNA, 16 bp, synthetic construct
  source 1..16: mol_type = other DNA
tattattagtatgtcc

SEQ ID NO: 1322 - DNA, 16 bp, synthetic construct
  source 1..16: mol_type = other DNA
caaagtgatatgaatg

SEQ ID NO: 1323 - DNA, 16 bp, synthetic construct
  source 1..16: mol_type = other DNA
ggtattaagaagcatt

SEQ ID NO: 1324 - DNA, 16 bp, synthetic construct
  source 1..16: mol_type = other DNA
ttattgataggcgaga

SEQ ID NO: 1325 - DNA, 16 bp, synthetic construct
  source 1..16: mol_type = other DNA
aagcaatggtatctgg

SEQ ID NO: 1326 - DNA, 16 bp, synthetic construct
  source 1..16: mol_type = other DNA
catgattttcttatag

SEQ ID NO: 1327 - DNA, 16 bp, synthetic construct
  source 1..16: mol_type = other DNA
ccaaaggacaagatgg

SEQ ID NO: 1328 - DNA, 16 bp, synthetic construct
  source 1..16: mol_type = other DNA
aacattctcagttaaa

SEQ ID NO: 1329 - DNA, 16 bp, synthetic construct
  source 1..16: mol_type = other DNA
ctttagtatagtaggt

SEQ ID NO: 1330 - DNA, 16 bp, synthetic construct
  source 1..16: mol_type = other DNA
actaatgaggatacat

SEQ ID NO: 1331 - DNA, 16 bp, synthetic construct
  source 1..16: mol_type = other DNA
gagtatggagcttcag

SEQ ID NO: 1332 - DNA, 16 bp, synthetic construct
  source 1..16: mol_type = other DNA
aaagctacgatctctc

SEQ ID NO: 1333 - DNA, 16 bp, synthetic construct
  source 1..16: mol_type = other DNA
aatagttacagctgtg

SEQ ID NO: 1334 - DNA, 16 bp, synthetic construct
  source 1..16: mol_type = other DNA
aagagttaggtttacg

SEQ ID NO: 1335 - DNA, 16 bp, synthetic construct
  source 1..16: mol_type = other DNA
gtaaataacacttcat

SEQ ID NO: 1336 - DNA, 16 bp, synthetic construct
  source 1..16: mol_type = other DNA
tgtataagtattcagc

SEQ ID NO: 1337 - DNA, 16 bp, synthetic construct
  source 1..16: mol_type = other DNA
aactatcctgtttgtt

SEQ ID NO: 1338 - DNA, 16 bp, synthetic construct
  source 1..16: mol_type = other DNA
ctcataatttagaggt

SEQ ID NO: 1339 - DNA, 16 bp, synthetic construct
  source 1..16: mol_type = other DNA
agtaatattgagatca

SEQ ID NO: 1340 - DNA, 16 bp, synthetic construct
  source 1..16: mol_type = other DNA
cattttggactgtaca

SEQ ID NO: 1341 - DNA, 16 bp, synthetic construct
  source 1..16: mol_type = other DNA
aaattcattcacgcat

SEQ ID NO: 1342 - DNA, 16 bp, synthetic construct
  source 1..16: mol_type = other DNA
ctagaactgcttcttc

SEQ ID NO: 1343 - DNA, 16 bp, synthetic construct
  source 1..16: mol_type = other DNA
tcatactaagattggc

SEQ ID NO: 1344 - DNA, 16 bp, synthetic construct
  source 1..16: mol_type = other DNA
agtaatttagcattcc

SEQ ID NO: 1345 - DNA, 16 bp, synthetic construct
  source 1..16: mol_type = other DNA
aaggattatgggctcc

SEQ ID NO: 1346 - DNA, 16 bp, synthetic construct
  source 1..16: mol_type = other DNA
gatttacatcctttca

SEQ ID NO: 1347 - DNA, 16 bp, synthetic construct
  source 1..16: mol_type = other DNA
gatgtaaataagatta

SEQ ID NO: 1348 - DNA, 16 bp, synthetic construct
  source 1..16: mol_type = other DNA
gcaaaatccagactca

SEQ ID NO: 1349 - DNA, 16 bp, synthetic construct
  source 1..16: mol_type = other DNA
ctctatttgaaagtgc

SEQ ID NO: 1350 - DNA, 16 bp, synthetic construct
  source 1..16: mol_type = other DNA
aaactttcatcagttg

SEQ ID NO: 1351 - DNA, 16 bp, synthetic construct
  source 1..16: mol_type = other DNA
agactacagggtgcga

SEQ ID NO: 1352 - DNA, 16 bp, synthetic construct
  source 1..16: mol_type = other DNA
gctgtaaaagcccagt

SEQ ID NO: 1353 - DNA, 16 bp, synthetic construct
  source 1..16: mol_type = other DNA
gccaatcaaattggtt

SEQ ID NO: 1354 - DNA, 16 bp, synthetic construct
  source 1..16: mol_type = other DNA
atcatataggaggcag

SEQ ID NO: 1355 - DNA, 16 bp, synthetic construct
  source 1..16: mol_type = other DNA
cttattaaagttatga

SEQ ID NO: 1356 - DNA, 16 bp, synthetic construct
  source 1..16: mol_type = other DNA
catcatagcacctcag

SEQ ID NO: 1357 - DNA, 16 bp, synthetic construct
  source 1..16: mol_type = other DNA
taaacttcataccttc

SEQ ID NO: 1358 - DNA, 16 bp, synthetic construct
  source 1..16: mol_type = other DNA
gtgaagtagaaatcca

SEQ ID NO: 1359 - DNA, 16 bp, synthetic construct
  source 1..16: mol_type = other DNA
gatactatagaatctc

SEQ ID NO: 1360 - DNA, 16 bp, synthetic construct
  source 1..16: mol_type = other DNA
aacatatagccacagc

SEQ ID NO: 1361 - DNA, 16 bp, synthetic construct
  source 1..16: mol_type = other DNA
gtttatatttgcatgc

SEQ ID NO: 1362 - DNA, 16 bp, synthetic construct
  source 1..16: mol_type = other DNA
gataacatcaaggtgc

SEQ ID NO: 1363 - DNA, 16 bp, synthetic construct
  source 1..16: mol_type = other DNA
aacattaaatcccagg

SEQ ID NO: 1364 - DNA, 16 bp, synthetic construct
  source 1..16: mol_type = other DNA
gtttattcaaggatcc

SEQ ID NO: 1365 - DNA, 16 bp, synthetic construct
  source 1..16: mol_type = other DNA
actttatcttgactaa

SEQ ID NO: 1366 - DNA, 16 bp, synthetic construct
  source 1..16: mol_type = other DNA
cttacctagaccttct

SEQ ID NO: 1367 - DNA, 16 bp, synthetic construct
  source 1..16: mol_type = other DNA
gtttatagtgaccatc

SEQ ID NO: 1368 - DNA, 16 bp, synthetic construct
  source 1..16: mol_type = other DNA
acttaccatgcagtaa

SEQ ID NO: 1369 - DNA, 16 bp, synthetic construct
  source 1..16: mol_type = other DNA
catgtaagatgtctgg

SEQ ID NO: 1370 - DNA, 16 bp, synthetic construct
  source 1..16: mol_type = other DNA
acaactaaatcagtct

SEQ ID NO: 1371 - DNA, 16 bp, synthetic construct
  source 1..16: mol_type = other DNA
agctatacatgatctt

SEQ ID NO: 1372 - DNA, 16 bp, synthetic construct
  source 1..16: mol_type = other DNA
gtattatgaagagttc

SEQ ID NO: 1373 - DNA, 16 bp, synthetic construct
  source 1..16: mol_type = other DNA
tcatttataggtcatg

SEQ ID NO: 1374 - DNA, 16 bp, synthetic construct
  source 1..16: mol_type = other DNA
attactgtagctccag

SEQ ID NO: 1375 - DNA, 16 bp, synthetic construct
  source 1..16: mol_type = other DNA
aagagttagacacttc

SEQ ID NO: 1376 - DNA, 16 bp, synthetic construct
  source 1..16: mol_type = other DNA
attacaagtcacctgc

SEQ ID NO: 1377 - DNA, 16 bp, synthetic construct
  source 1..16: mol_type = other DNA
caactatgtcaatcag

SEQ ID NO: 1378 - DNA, 16 bp, synthetic construct
  source 1..16: mol_type = other DNA
ggagaattcattagtc

SEQ ID NO: 1379 - DNA, 16 bp, synthetic construct
  source 1..16: mol_type = other DNA
gctaatttcataggta

SEQ ID NO: 1380 - DNA, 16 bp, synthetic construct
  source 1..16: mol_type = other DNA
aggtagagctgaccaa

SEQ ID NO: 1381 - DNA, 16 bp, synthetic construct
  source 1..16: mol_type = other DNA
aatatgtaccataggc

SEQ ID NO: 1382 - DNA, 16 bp, synthetic construct
  source 1..16: mol_type = other DNA
accaataagcaatcag

SEQ ID NO: 1383 - DNA, 16 bp, synthetic construct
  source 1..16: mol_type = other DNA
ccttataagcaatgac

SEQ ID NO: 1384 - DNA, 16 bp, synthetic construct
  source 1..16: mol_type = other DNA
catgaggaatgtccaa

SEQ ID NO: 1385 - DNA, 16 bp, synthetic construct
  source 1..16: mol_type = other DNA
aacaaagtcactttgc

SEQ ID NO: 1386 - DNA, 16 bp, synthetic construct
  source 1..16: mol_type = other DNA
aaggaatgatctgcag

SEQ ID NO: 1387 - DNA, 16 bp, synthetic construct
  source 1..16: mol_type = other DNA
ccagtaagaggctgga

SEQ ID NO: 1388 - DNA, 16 bp, synthetic construct
  source 1..16: mol_type = other DNA
acacaaattactgttc

SEQ ID NO: 1389 - DNA, 16 bp, synthetic construct
  source 1..16: mol_type = other DNA
aaaatagctatcaggc

SEQ ID NO: 1390 - DNA, 16 bp, synthetic construct
  source 1..16: mol_type = other DNA
gaaaatgtggttggct

SEQ ID NO: 1391 - DNA, 16 bp, synthetic construct
  source 1..16: mol_type = other DNA
ctagattaggataaca

SEQ ID NO: 1392 - DNA, 16 bp, synthetic construct
  source 1..16: mol_type = other DNA
acggattaccagaaag

SEQ ID NO: 1393 - DNA, 16 bp, synthetic construct
  source 1..16: mol_type = other DNA
tactaagactgcacag

SEQ ID NO: 1394 - DNA, 16 bp, synthetic construct
  source 1..16: mol_type = other DNA
tacaacaatggcaggt

SEQ ID NO: 1395 - DNA, 16 bp, synthetic construct
  source 1..16: mol_type = other DNA
taaactccatggcttt

SEQ ID NO: 1396 - DNA, 16 bp, synthetic construct
  source 1..16: mol_type = other DNA
tatactttagtgcttg

SEQ ID NO: 1397 - DNA, 16 bp, synthetic construct
  source 1..16: mol_type = other DNA
aaattaaaagacggcc

SEQ ID NO: 1398 - DNA, 16 bp, synthetic construct
  source 1..16: mol_type = other DNA
gtattattagtatgtc

SEQ ID NO: 1399 - DNA, 16 bp, synthetic construct
  source 1..16: mol_type = other DNA
tcggtattaagaagca

SEQ ID NO: 1400 - DNA, 16 bp, synthetic construct
  source 1..16: mol_type = other DNA
attattgataggcgag

SEQ ID NO: 1401 - DNA, 16 bp, synthetic construct
  source 1..16: mol_type = other DNA
ttgtatcagattacct

SEQ ID NO: 1402 - DNA, 16 bp, synthetic construct
  source 1..16: mol_type = other DNA
agtctataggcatgat

SEQ ID NO: 1403 - DNA, 16 bp, synthetic construct
  source 1..16: mol_type = other DNA
accaacactgcctgca

SEQ ID NO: 1404 - DNA, 16 bp, synthetic construct
  source 1..16: mol_type = other DNA
tattatcagctcacac

SEQ ID NO: 1405 - DNA, 16 bp, synthetic construct
  source 1..16: mol_type = other DNA
accatatgaataaaga

SEQ ID NO: 1406 - DNA, 16 bp, synthetic construct
  source 1..16: mol_type = other DNA
attcatcccaaacatt

SEQ ID NO: 1407 - DNA, 16 bp, synthetic construct
  source 1..16: mol_type = other DNA
actttattaagcctcc

SEQ ID NO: 1408 - DNA, 16 bp, synthetic construct
  source 1..16: mol_type = other DNA
gtccataagctctttc

SEQ ID NO: 1409 - DNA, 16 bp, synthetic construct
  source 1..16: mol_type = other DNA
gatattggagccatca

SEQ ID NO: 1410 - DNA, 16 bp, synthetic construct
  source 1..16: mol_type = other DNA
tagtatttcaagaggc

SEQ ID NO: 1411 - DNA, 16 bp, synthetic construct
  source 1..16: mol_type = other DNA
gttactagactcacca

SEQ ID NO: 1412 - DNA, 16 bp, synthetic construct
  source 1..16: mol_type = other DNA
gtatcttagattcaaa

SEQ ID NO: 1413 - DNA, 16 bp, synthetic construct
  source 1..16: mol_type = other DNA
gtatacataagagtct

SEQ ID NO: 1414 - DNA, 16 bp, synthetic construct
  source 1..16: mol_type = other DNA
aatttagaagatgcca

SEQ ID NO: 1415 - DNA, 16 bp, synthetic construct
  source 1..16: mol_type = other DNA
agtgattaatagttac

SEQ ID NO: 1416 - DNA, 16 bp, synthetic construct
  source 1..16: mol_type = other DNA
tagatttaaacagtct

SEQ ID NO: 1417 - DNA, 16 bp, synthetic construct
  source 1..16: mol_type = other DNA
ctgtataagtattcag

SEQ ID NO: 1418 - DNA, 16 bp, synthetic construct
  source 1..16: mol_type = other DNA
ccaaagtatcacctta

SEQ ID NO: 1419 - DNA, 16 bp, synthetic construct
  source 1..16: mol_type = other DNA
gccaataaccatagtt

SEQ ID NO: 1420 - DNA, 16 bp, synthetic construct
  source 1..16: mol_type = other DNA
gagtatattgtatgac

SEQ ID NO: 1421 - DNA, 16 bp, synthetic construct
  source 1..16: mol_type = other DNA
tatacttcagattgtt

SEQ ID NO: 1422 - DNA, 16 bp, synthetic construct
  source 1..16: mol_type = other DNA
tgtaatatttgtcatc

SEQ ID NO: 1423 - DNA, 16 bp, synthetic construct
  source 1..16: mol_type = other DNA
ccatattatgtgcttc

SEQ ID NO: 1424 - DNA, 16 bp, synthetic construct
  source 1..16: mol_type = other DNA
ccattttgaacccaca

SEQ ID NO: 1425 - DNA, 16 bp, synthetic construct
  source 1..16: mol_type = other DNA
gctaaacttcatacct

SEQ ID NO: 1426 - DNA, 16 bp, synthetic construct
  source 1..16: mol_type = other DNA
gcctactattgactag

SEQ ID NO: 1427 - DNA, 16 bp, synthetic construct
  source 1..16: mol_type = other DNA
cctactagactgctgg

SEQ ID NO: 1428 - DNA, 16 bp, synthetic construct
  source 1..16: mol_type = other DNA
atcagttaaagatgag

SEQ ID NO: 1429 - DNA, 16 bp, synthetic construct
  source 1..16: mol_type = other DNA
agcttataaatcctgc

SEQ ID NO: 1430 - DNA, 16 bp, synthetic construct
  source 1..16: mol_type = other DNA
ctcataaagatgacca

SEQ ID NO: 1431 - DNA, 16 bp, synthetic construct
  source 1..16: mol_type = other DNA
gacaaatcacttgtgg

SEQ ID NO: 1432 - DNA, 16 bp, synthetic construct
  source 1..16: mol_type = other DNA
gcaaagtcttaccaca

SEQ ID NO: 1433 - DNA, 16 bp, synthetic construct
  source 1..16: mol_type = other DNA
cactagttaatcctca

SEQ ID NO: 1434 - DNA, 16 bp, synthetic construct
  source 1..16: mol_type = other DNA
ttaacaatatccacac

SEQ ID NO: 1435 - DNA, 16 bp, synthetic construct
  source 1..16: mol_type = other DNA
catgtaataaagaggt

SEQ ID NO: 1436 - DNA, 16 bp, synthetic construct
  source 1..16: mol_type = other DNA
acttatattagatggt

SEQ ID NO: 1437 - DNA, 16 bp, synthetic construct
  source 1..16: mol_type = other DNA
cattttagatgctgta

SEQ ID NO: 1438 - DNA, 16 bp, synthetic construct
  source 1..16: mol_type = other DNA
aagatatcagctctct

SEQ ID NO: 1439 - DNA, 16 bp, synthetic construct
  source 1..16: mol_type = other DNA
taagagttttgcagta

SEQ ID NO: 1440 - DNA, 16 bp, synthetic construct
  source 1..16: mol_type = other DNA
ttaacttagtcttcca

SEQ ID NO: 1441 - DNA, 16 bp, synthetic construct
  source 1..16: mol_type = other DNA
gattactgtagctcca

SEQ ID NO: 1442 - DNA, 16 bp, synthetic construct
  source 1..16: mol_type = other DNA
atcatactaagattgg

SEQ ID NO: 1443 - DNA, 16 bp, synthetic construct
  source 1..16: mol_type = other DNA
tgttattatacttgta

SEQ ID NO: 1444 - DNA, 16 bp, synthetic construct
  source 1..16: mol_type = other DNA
caaactttcatcagtt

SEQ ID NO: 1445 - DNA, 16 bp, synthetic construct
  source 1..16: mol_type = other DNA
caaaattcattcacgc

SEQ ID NO: 1446 - DNA, 16 bp, synthetic construct
  source 1..16: mol_type = other DNA
agtattatgaagagtt

SEQ ID NO: 1447 - DNA, 16 bp, synthetic construct
  source 1..16: mol_type = other DNA
tgttttagagaactcc

SEQ ID NO: 1448 - DNA, 16 bp, synthetic construct
  source 1..16: mol_type = other DNA
actaacactttataca

SEQ ID NO: 1449 - DNA, 16 bp, synthetic construct
  source 1..16: mol_type = other DNA
tcagtaattagactta

SEQ ID NO: 1450 - DNA, 16 bp, synthetic construct
  source 1..16: mol_type = other DNA
gatacaaatttctgga

SEQ ID NO: 1451 - DNA, 16 bp, synthetic construct
  source 1..16: mol_type = other DNA
tgtatacaaagctgaa

SEQ ID NO: 1452 - DNA, 16 bp, synthetic construct
  source 1..16: mol_type = other DNA
taaatttcagtggaga

SEQ ID NO: 1453 - DNA, 16 bp, synthetic construct
  source 1..16: mol_type = other DNA
tataccttccatcaga

SEQ ID NO: 1454 - DNA, 16 bp, synthetic construct
  source 1..16: mol_type = other DNA
gatatgagaaaccttc

SEQ ID NO: 1455 - DNA, 16 bp, synthetic construct
  source 1..16: mol_type = other DNA
tctttagtatagtagg

SEQ ID NO: 1456 - DNA, 16 bp, synthetic construct
  source 1..16: mol_type = other DNA
gagaaatcaggagtcc

SEQ ID NO: 1457 - DNA, 16 bp, synthetic construct
  source 1..16: mol_type = other DNA
aagtatcaagtaaagt

SEQ ID NO: 1458 - DNA, 16 bp, synthetic construct
  source 1..16: mol_type = other DNA
accttatattccctgt

SEQ ID NO: 1459 - DNA, 16 bp, synthetic construct
  source 1..16: mol_type = other DNA
tccttataagcaatga

SEQ ID NO: 1460 - DNA, 16 bp, synthetic construct
  source 1..16: mol_type = other DNA
attatacttaccatgc

SEQ ID NO: 1461 - DNA, 16 bp, synthetic construct
  source 1..16: mol_type = other DNA
gcatttggatcatgag

SEQ ID NO: 1462 - DNA, 16 bp, synthetic construct
  source 1..16: mol_type = other DNA
tgtaaactttgttcct

SEQ ID NO: 1463 - DNA, 16 bp, synthetic construct
  source 1..16: mol_type = other DNA
taaaatagctatcagg

SEQ ID NO: 1464 - DNA, 16 bp, synthetic construct
  source 1..16: mol_type = other DNA
tataaactccatggct

SEQ ID NO: 1465 - DNA, 16 bp, synthetic construct
  source 1..16: mol_type = other DNA
atggaaggaagtccca

SEQ ID NO: 1466 - DNA, 16 bp, synthetic construct
  source 1..16: mol_type = other DNA
ctatcaaggagactga

SEQ ID NO: 1467 - DNA, 16 bp, synthetic construct
  source 1..16: mol_type = other DNA
catattggtaactatc

SEQ ID NO: 1468 - DNA, 16 bp, synthetic construct
  source 1..16: mol_type = other DNA
gctgatggaaaagtgc

SEQ ID NO: 1469 - DNA, 16 bp, synthetic construct
  source 1..16: mol_type = other DNA
acaatggagaaacttc

SEQ ID NO: 1470 - DNA, 16 bp, synthetic construct
  source 1..16: mol_type = other DNA
taaatatattcacgga

SEQ ID NO: 1471 - DNA, 16 bp, synthetic construct
  source 1..16: mol_type = other DNA
atatactttagtgctt

SEQ ID NO: 1472 - DNA, 16 bp, synthetic construct
  source 1..16: mol_type = other DNA
atacaacaatggcagg

SEQ ID NO: 1473 - DNA, 16 bp, synthetic construct
  source 1..16: mol_type = other DNA
ttactaagactgcaca

SEQ ID NO: 1474 - DNA, 16 bp, synthetic construct
  source 1..16: mol_type = other DNA
agaaattaaaagacgg

SEQ ID NO: 1475 - DNA, 16 bp, synthetic construct
  source 1..16: mol_type = other DNA
ggtattattagtatgt

SEQ ID NO: 1476 - DNA, 16 bp, synthetic construct
  source 1..16: mol_type = other DNA
gatcggtattaagaag

SEQ ID NO: 1477 - DNA, 16 bp, synthetic construct
  source 1..16: mol_type = other DNA
tattattgataggcga

SEQ ID NO: 1478 - DNA, 16 bp, synthetic construct
  source 1..16: mol_type = other DNA
ttcaaggatttgtatc

SEQ ID NO: 1479 - DNA, 16 bp, synthetic construct
  source 1..16: mol_type = other DNA
ctccttataagcaatg

SEQ ID NO: 1480 - DNA, 16 bp, synthetic construct
  source 1..16: mol_type = other DNA
atcattgtagagtcta

SEQ ID NO: 1481 - DNA, 16 bp, synthetic construct
  source 1..16: mol_type = other DNA
atattatcagctcaca

SEQ ID NO: 1482 - DNA, 16 bp, synthetic construct
  source 1..16: mol_type = other DNA
accaagcatgcatcca

SEQ ID NO: 1483 - DNA, 16 bp, synthetic construct
  source 1..16: mol_type = other DNA
ctctgaaggagctttc

SEQ ID NO: 1484 - DNA, 16 bp, synthetic construct
  source 1..16: mol_type = other DNA
caggataagagtgctg

SEQ ID NO: 1485 - DNA, 16 bp, synthetic construct
  source 1..16: mol_type = other DNA
tagataaagaggcatt

SEQ ID NO: 1486 - DNA, 16 bp, synthetic construct
  source 1..16: mol_type = other DNA
tatcatccaaagccca

SEQ ID NO: 1487 - DNA, 16 bp, synthetic construct
  source 1..16: mol_type = other DNA
gtaaatttcagtggag

SEQ ID NO: 1488 - DNA, 16 bp, synthetic construct
  source 1..16: mol_type = other DNA
ccaaactttcatcagt

SEQ ID NO: 1489 - DNA, 16 bp, synthetic construct
  source 1..16: mol_type = other DNA
gtataagattttcttc

SEQ ID NO: 1490 - DNA, 16 bp, synthetic construct
  source 1..16: mol_type = other DNA
ccttaacattgtctca

SEQ ID NO: 1491 - DNA, 16 bp, synthetic construct
  source 1..16: mol_type = other DNA
gtttacttaaagtctg

SEQ ID NO: 1492 - DNA, 16 bp, synthetic construct
  source 1..16: mol_type = other DNA
ctttatacaacttccc

SEQ ID NO: 1493 - DNA, 16 bp, synthetic construct
  source 1..16: mol_type = other DNA
tcaaatccttgcatct

SEQ ID NO: 1494 - DNA, 16 bp, synthetic construct
  source 1..16: mol_type = other DNA
cctattaaatgcccat

SEQ ID NO: 1495 - DNA, 16 bp, synthetic construct
  source 1..16: mol_type = other DNA
atagtatcttagattc

SEQ ID NO: 1496 - DNA, 16 bp, synthetic construct
  source 1..16: mol_type = other DNA
caaattagaaggtgtc

SEQ ID NO: 1497 - DNA, 16 bp, synthetic construct
  source 1..16: mol_type = other DNA
gtagaatagttcttcc

SEQ ID NO: 1498 - DNA, 16 bp, synthetic construct
  source 1..16: mol_type = other DNA
gataatcacaggttgt

SEQ ID NO: 1499 - DNA, 16 bp, synthetic construct
  source 1..16: mol_type = other DNA
tttaacttagtcttcc

SEQ ID NO: 1500 - DNA, 16 bp, synthetic construct
  source 1..16: mol_type = other DNA
acaaatttatgaggct

SEQ ID NO: 1501 - DNA, 16 bp, synthetic construct
  source 1..16: mol_type = other DNA
ttcaagttaatggtca

SEQ ID NO: 1502 - DNA, 16 bp, synthetic construct
  source 1..16: mol_type = other DNA
gaaactcagaccaggc

SEQ ID NO: 1503 - DNA, 16 bp, synthetic construct
  source 1..16: mol_type = other DNA
ccaactaacttccagc

SEQ ID NO: 1504 - DNA, 16 bp, synthetic construct
  source 1..16: mol_type = other DNA
ctgtatacaaagctga

SEQ ID NO: 1505 - DNA, 16 bp, synthetic construct
  source 1..16: mol_type = other DNA
tcaataatgatagtca

SEQ ID NO: 1506 - DNA, 16 bp, synthetic construct
  source 1..16: mol_type = other DNA
cttgaatcaaatctgg

SEQ ID NO: 1507 - DNA, 16 bp, synthetic construct
  source 1..16: mol_type = other DNA
ttagatatggtccttc

SEQ ID NO: 1508 - DNA, 16 bp, synthetic construct
  source 1..16: mol_type = other DNA
gctcaaatgtaatcat

SEQ ID NO: 1509 - DNA, 16 bp, synthetic construct
  source 1..16: mol_type = other DNA
gattatacttaccatg

SEQ ID NO: 1510 - DNA, 16 bp, synthetic construct
  source 1..16: mol_type = other DNA
tcagatttaataggtc

SEQ ID NO: 1511 - DNA, 16 bp, synthetic construct
  source 1..16: mol_type = other DNA
atgctaaaggcacaga

SEQ ID NO: 1512 - DNA, 16 bp, synthetic construct
  source 1..16: mol_type = other DNA
tctttaagatgactgt

SEQ ID NO: 1513 - DNA, 16 bp, synthetic construct
  source 1..16: mol_type = other DNA
gacttatattagatgg

SEQ ID NO: 1514 - DNA, 16 bp, synthetic construct
  source 1..16: mol_type = other DNA
aagaattcatttggag

SEQ ID NO: 1515 - DNA, 16 bp, synthetic construct
  source 1..16: mol_type = other DNA
acactattttgactac

SEQ ID NO: 1516 - DNA, 16 bp, synthetic construct
  source 1..16: mol_type = other DNA
gaaatactgtcgacac

SEQ ID NO: 1517 - DNA, 16 bp, synthetic construct
  source 1..16: mol_type = other DNA
cacttactggttccag

SEQ ID NO: 1518 - DNA, 16 bp, synthetic construct
  source 1..16: mol_type = other DNA
ttctttagtatagtag

SEQ ID NO: 1519 - DNA, 16 bp, synthetic construct
  source 1..16: mol_type = other DNA
gagtattatgaagagt

SEQ ID NO: 1520 - DNA, 16 bp, synthetic construct
  source 1..16: mol_type = other DNA
agttatcaagttttca

SEQ ID NO: 1521 - DNA, 16 bp, synthetic construct
  source 1..16: mol_type = other DNA
gtagataacctgagga

SEQ ID NO: 1522 - DNA, 16 bp, synthetic construct
  source 1..16: mol_type = other DNA
gatatactttagtgct

SEQ ID NO: 1523 - DNA, 16 bp, synthetic construct
  source 1..16: mol_type = other DNA
ccttttgaatcatact

SEQ ID NO: 1524 - DNA, 16 bp, synthetic construct
  source 1..16: mol_type = other DNA
tgatacaaatttctgg

SEQ ID NO: 1525 - DNA, 16 bp, synthetic construct
  source 1..16: mol_type = other DNA
gctatttagaaggtaa

SEQ ID NO: 1526 - DNA, 16 bp, synthetic construct
  source 1..16: mol_type = other DNA
actatttagatcatga

SEQ ID NO: 1527 - DNA, 16 bp, synthetic construct
  source 1..16: mol_type = other DNA
actaatagttcctttc

SEQ ID NO: 1528 - DNA, 16 bp, synthetic construct
  source 1..16: mol_type = other DNA
ccacaatactggcttt

SEQ ID NO: 1529 - DNA, 16 bp, synthetic construct
  source 1..16: mol_type = other DNA
gaagagttaattccaa

SEQ ID NO: 1530 - DNA, 16 bp, synthetic construct
  source 1..16: mol_type = other DNA
gctgaattatttgtct

SEQ ID NO: 1531 - DNA, 16 bp, synthetic construct
  source 1..16: mol_type = other DNA
gaagtagagatggcat

SEQ ID NO: 1532 - DNA, 16 bp, synthetic construct
  source 1..16: mol_type = other DNA
tatttacatggatctc

SEQ ID NO: 1533 - DNA, 16 bp, synthetic construct
  source 1..16: mol_type = other DNA
atagtatgatagcaca

SEQ ID NO: 1534 - DNA, 16 bp, synthetic construct
  source 1..16: mol_type = other DNA
actttatgagccagcc

SEQ ID NO: 1535 - DNA, 16 bp, synthetic construct
  source 1..16: mol_type = other DNA
tcaataatacagacgg

SEQ ID NO: 1536 - DNA, 16 bp, synthetic construct
  source 1..16: mol_type = other DNA
caagaatccacttttg

SEQ ID NO: 1537 - DNA, 16 bp, synthetic construct
  source 1..16: mol_type = other DNA
ctgtaaactttgttcc

SEQ ID NO: 1538 - DNA, 16 bp, synthetic construct
  source 1..16: mol_type = other DNA
atatggaaggaagtcc

SEQ ID NO: 1539 - DNA, 16 bp, synthetic construct
  source 1..16: mol_type = other DNA
tttaagtttaaacacg

SEQ ID NO: 1540 - DNA, 16 bp, synthetic construct
  source 1..16: mol_type = other DNA
aatacaacaatggcag

SEQ ID NO: 1541 - DNA, 16 bp, synthetic construct
  source 1..16: mol_type = other DNA
ttaaatatattcacgg

SEQ ID NO: 1542 - DNA, 16 bp, synthetic construct
  source 1..16: mol_type = other DNA
tttataaactccatgg

SEQ ID NO: 1543 - DNA, 16 bp, synthetic construct
  source 1..16: mol_type = other DNA
ctaaaatagctatcag

SEQ ID NO: 1544 - DNA, 16 bp, synthetic construct
  source 1..16: mol_type = other DNA
gacaatggagaaactt

SEQ ID NO: 1545 - DNA, 16 bp, synthetic construct
  source 1..16: mol_type = other DNA
gagtagtagcagagtg

SEQ ID NO: 1546 - DNA, 16 bp, synthetic construct
  source 1..16: mol_type = other DNA
ctttaacaatatccac

SEQ ID NO: 1547 - DNA, 16 bp, synthetic construct
  source 1..16: mol_type = other DNA
ccatattggtaactat

SEQ ID NO: 1548 - DNA, 16 bp, synthetic construct
  source 1..16: mol_type = other DNA
gaaaccaacactgcct

SEQ ID NO: 1549 - DNA, 16 bp, synthetic construct
  source 1..16: mol_type = other DNA
gaagttagggtgctta

SEQ ID NO: 1550 - DNA, 16 bp, synthetic construct
  source 1..16: mol_type = other DNA
agttactaagactgca

SEQ ID NO: 1551 - DNA, 16 bp, synthetic construct
  source 1..16: mol_type = other DNA
tagatcggtattaaga

SEQ ID NO: 1552 - DNA, 16 bp, synthetic construct
  source 1..16: mol_type = other DNA
ggtattattgataggc

SEQ ID NO: 1553 - DNA, 16 bp, synthetic construct
  source 1..16: mol_type = other DNA
attcaaggatttgtat

SEQ ID NO: 1554 - DNA, 16 bp, synthetic construct
  source 1..16: mol_type = other DNA
ctaacctcattttttc

SEQ ID NO: 1555 - DNA, 16 bp, synthetic construct
  source 1..16: mol_type = other DNA
tttcaaacatcttgtg

SEQ ID NO: 1556 - DNA, 16 bp, synthetic construct
  source 1..16: mol_type = other DNA
ggtatgataatattat

SEQ ID NO: 1557 - DNA, 16 bp, synthetic construct
  source 1..16: mol_type = other DNA
atatcagttaccaagc

SEQ ID NO: 1558 - DNA, 16 bp, synthetic construct
  source 1..16: mol_type = other DNA
tttcaagaaaccaaca

SEQ ID NO: 1559 - DNA, 16 bp, synthetic construct
  source 1..16: mol_type = other DNA
acactatttagatcat

SEQ ID NO: 1560 - DNA, 16 bp, synthetic construct
  source 1..16: mol_type = other DNA
agaacttgaaggctta

SEQ ID NO: 1561 - DNA, 16 bp, synthetic construct
  source 1..16: mol_type = other DNA
cagcaatttagagcaa

SEQ ID NO: 1562 - DNA, 16 bp, synthetic construct
  source 1..16: mol_type = other DNA
agagtattatgaagag

SEQ ID NO: 1563 - DNA, 16 bp, synthetic construct
  source 1..16: mol_type = other DNA
gataatgctaaaggca

SEQ ID NO: 1564 - DNA, 16 bp, synthetic construct
  source 1..16: mol_type = other DNA
ttaacagtagaggtcc

SEQ ID NO: 1565 - DNA, 16 bp, synthetic construct
  source 1..16: mol_type = other DNA
atggtaaaatagaggt

SEQ ID NO: 1566 - DNA, 16 bp, synthetic construct
  source 1..16: mol_type = other DNA
aagctatttagaaggt

SEQ ID NO: 1567 - DNA, 16 bp, synthetic construct
  source 1..16: mol_type = other DNA
tcaatagtatcttaga

SEQ ID NO: 1568 - DNA, 16 bp, synthetic construct
  source 1..16: mol_type = other DNA
ttcttaaaagagctcc

SEQ ID NO: 1569 - DNA, 16 bp, synthetic construct
  source 1..16: mol_type = other DNA
caaaccatgtttggtc

SEQ ID NO: 1570 - DNA, 16 bp, synthetic construct
  source 1..16: mol_type = other DNA
ttattaagtcaggtca

SEQ ID NO: 1571 - DNA, 16 bp, synthetic construct
  source 1..16: mol_type = other DNA
gtagataaagaggcat

SEQ ID NO: 1572 - DNA, 16 bp, synthetic construct
  source 1..16: mol_type = other DNA
tatacatagtacaagg

SEQ ID NO: 1573 - DNA, 16 bp, synthetic construct
  source 1..16: mol_type = other DNA
tttagagacatgccca

SEQ ID NO: 1574 - DNA, 16 bp, synthetic construct
  source 1..16: mol_type = other DNA
aacaatgtattgtcat

SEQ ID NO: 1575 - DNA, 16 bp, synthetic construct
  source 1..16: mol_type = other DNA
gaaatcaacattccag

SEQ ID NO: 1576 - DNA, 16 bp, synthetic construct
  source 1..16: mol_type = other DNA
acactaatagttcctt

SEQ ID NO: 1577 - DNA, 16 bp, synthetic construct
  source 1..16: mol_type = other DNA
tgtaagttcattatct

SEQ ID NO: 1578 - DNA, 16 bp, synthetic construct
  source 1..16: mol_type = other DNA
acaatagagcaagtga

SEQ ID NO: 1579 - DNA, 16 bp, synthetic construct
  source 1..16: mol_type = other DNA
ggtaaatttcagtgga

SEQ ID NO: 1580 - DNA, 16 bp, synthetic construct
  source 1..16: mol_type = other DNA
gattttaggctactca

SEQ ID NO: 1581 - DNA, 16 bp, synthetic construct
  source 1..16: mol_type = other DNA
cagtataagattttct

SEQ ID NO: 1582 - DNA, 16 bp, synthetic construct
  source 1..16: mol_type = other DNA
cctttatacaacttcc

SEQ ID NO: 1583 - DNA, 16 bp, synthetic construct
  source 1..16: mol_type = other DNA
catgaatctgtataca

SEQ ID NO: 1584 - DNA, 16 bp, synthetic construct
  source 1..16: mol_type = other DNA
agagtaatattggcac

SEQ ID NO: 1585 - DNA, 16 bp, synthetic construct
  source 1..16: mol_type = other DNA
gcattagcaaaatcag

SEQ ID NO: 1586 - DNA, 16 bp, synthetic construct
  source 1..16: mol_type = other DNA
gcttaatctagagaga

SEQ ID NO: 1587 - DNA, 16 bp, synthetic construct
  source 1..16: mol_type = other DNA
aaatttcaatgcacta

SEQ ID NO: 1588 - DNA, 16 bp, synthetic construct
  source 1..16: mol_type = other DNA
tctataacatgctact

SEQ ID NO: 1589 - DNA, 16 bp, synthetic construct
  source 1..16: mol_type = other DNA
ttaatcatatccacac

SEQ ID NO: 1590 - DNA, 16 bp, synthetic construct
  source 1..16: mol_type = other DNA
gcaaatcaagcttctt

SEQ ID NO: 1591 - DNA, 16 bp, synthetic construct
  source 1..16: mol_type = other DNA
aggtattattagtatg

SEQ ID NO: 1592 - DNA, 16 bp, synthetic construct
  source 1..16: mol_type = other DNA
atctttaagatgactg

SEQ ID NO: 1593 - DNA, 16 bp, synthetic construct
  source 1..16: mol_type = other DNA
tttacaaagttgttcc

SEQ ID NO: 1594 - DNA, 16 bp, synthetic construct
  source 1..16: mol_type = other DNA
accaaactttcatcag

SEQ ID NO: 1595 - DNA, 16 bp, synthetic construct
  source 1..16: mol_type = other DNA
aaggtttaaaccacag

SEQ ID NO: 1596 - DNA, 16 bp, synthetic construct
  source 1..16: mol_type = other DNA
cgctttaaaacagcaa

SEQ ID NO: 1597 - DNA, 16 bp, synthetic construct
  source 1..16: mol_type = other DNA
gttctataaactgttc

SEQ ID NO: 1598 - DNA, 16 bp, synthetic construct
  source 1..16: mol_type = other DNA
gaaacaatctgtccat

SEQ ID NO: 1599 - DNA, 16 bp, synthetic construct
  source 1..16: mol_type = other DNA
ctgaagagttaattcc

SEQ ID NO: 1600 - DNA, 16 bp, synthetic construct
  source 1..16: mol_type = other DNA
atactttatgagccag

SEQ ID NO: 1601 - DNA, 16 bp, synthetic construct
  source 1..16: mol_type = other DNA
agggaaaattcatggc

SEQ ID NO: 1602 - DNA, 16 bp, synthetic construct
  source 1..16: mol_type = other DNA
tcctattaaatgccca

SEQ ID NO: 1603 - DNA, 16 bp, synthetic construct
  source 1..16: mol_type = other DNA
tcattatataacctta

SEQ ID NO: 1604 - DNA, 16 bp, synthetic construct
  source 1..16: mol_type = other DNA
gtaaactaatcacaca

SEQ ID NO: 1605 - DNA, 16 bp, synthetic construct
  source 1..16: mol_type = other DNA
accaactaacttccag

SEQ ID NO: 1606 - DNA, 16 bp, synthetic construct
  source 1..16: mol_type = other DNA
tctactaaaaccctca

SEQ ID NO: 1607 - DNA, 16 bp, synthetic construct
  source 1..16: mol_type = other DNA
tatagtatgatagcac

SEQ ID NO: 1608 - DNA, 16 bp, synthetic construct
  source 1..16: mol_type = other DNA
accaaataaagctcca

SEQ ID NO: 1609 - DNA, 16 bp, synthetic construct
  source 1..16: mol_type = other DNA
gtttaagtgcaattta

SEQ ID NO: 1610 - DNA, 16 bp, synthetic construct
  source 1..16: mol_type = other DNA
ataaatctgtggatga

SEQ ID NO: 1611 - DNA, 16 bp, synthetic construct
  source 1..16: mol_type = other DNA
taggataaagctctaa

SEQ ID NO: 1612 - DNA, 16 bp, synthetic construct
  source 1..16: mol_type = other DNA
tcaagaatgttctggt

SEQ ID NO: 1613 - DNA, 16 bp, synthetic construct
  source 1..16: mol_type = other DNA
gccaagaatccacttt

SEQ ID NO: 1614 - DNA, 16 bp, synthetic construct
  source 1..16: mol_type = other DNA
aaagttactaagactg

SEQ ID NO: 1615 - DNA, 16 bp, synthetic construct
  source 1..16: mol_type = other DNA
aaagttgagtagtagc

SEQ ID NO: 1616 - DNA, 16 bp, synthetic construct
  source 1..16: mol_type = other DNA
atcaagacgcacaggg

SEQ ID NO: 1617 - DNA, 16 bp, synthetic construct
  source 1..16: mol_type = other DNA
catatggaaggaagtc

SEQ ID NO: 1618 - DNA, 16 bp, synthetic construct
  source 1..16: mol_type = other DNA
aggaattgaagttagg

SEQ ID NO: 1619 - DNA, 16 bp, synthetic construct
  source 1..16: mol_type = other DNA
tgatatactttagtgc

SEQ ID NO: 1620 - DNA, 16 bp, synthetic construct
  source 1..16: mol_type = other DNA
agtcaatgggctgtaa

SEQ ID NO: 1621 - DNA, 16 bp, synthetic construct
  source 1..16: mol_type = other DNA
caaatacaacaatggc

SEQ ID NO: 1622 - DNA, 16 bp, synthetic construct
  source 1..16: mol_type = other DNA
cactttaacaatatcc

SEQ ID NO: 1623 - DNA, 16 bp, synthetic construct
  source 1..16: mol_type = other DNA
agtaagacaatggaga

SEQ ID NO: 1624 - DNA, 16 bp, synthetic construct
  source 1..16: mol_type = other DNA
gctaaaatagctatca

SEQ ID NO: 1625 - DNA, 16 bp, synthetic construct
  source 1..16: mol_type = other DNA
gatacatgggccatat

SEQ ID NO: 1626 - DNA, 16 bp, synthetic construct
  source 1..16: mol_type = other DNA
ctttataaactccatg

SEQ ID NO: 1627 - DNA, 16 bp, synthetic construct
  source 1..16: mol_type = other DNA
agacaatctgtacaga

SEQ ID NO: 1628 - DNA, 16 bp, synthetic construct
  source 1..16: mol_type = other DNA
atttaatggttcctcg

SEQ ID NO: 1629 - DNA, 16 bp, synthetic construct
  source 1..16: mol_type = other DNA
gggtattattgatagg

SEQ ID NO: 1630 - DNA, 16 bp, synthetic construct
  source 1..16: mol_type = other DNA
ccatgtagatcggtat

SEQ ID NO: 1631 - DNA, 16 bp, synthetic construct
  source 1..16: mol_type = other DNA
ttagatctaacacctt

SEQ ID NO: 1632 - DNA, 16 bp, synthetic construct
  source 1..16: mol_type = other DNA
aaatcattaccacttg

SEQ ID NO: 1633 - DNA, 16 bp, synthetic construct
  source 1..16: mol_type = other DNA
aacaatcaactttcaa

SEQ ID NO: 1634 - DNA, 16 bp, synthetic construct
  source 1..16: mol_type = other DNA
ctttcaagaaaccaac

SEQ ID NO: 1635 - DNA, 16 bp, synthetic construct
  source 1..16: mol_type = other DNA
cgaagtaggtattatt

SEQ ID NO: 1636 - DNA, 16 bp, synthetic construct
  source 1..16: mol_type = other DNA
tggtatgataatatta

SEQ ID NO: 1637 - DNA, 16 bp, synthetic construct
  source 1..16: mol_type = other DNA
gatatcagttaccaag

SEQ ID NO: 1638 - DNA, 16 bp, synthetic construct
  source 1..16: mol_type = other DNA
atctatctgatgctta

SEQ ID NO: 1639 - DNA, 16 bp, synthetic construct
  source 1..16: mol_type = other DNA
gaaattcaaggatttg

SEQ ID NO: 1640 - DNA, 16 bp, synthetic construct
  source 1..16: mol_type = other DNA
gtaaattcagtattca

SEQ ID NO: 1641 - DNA, 16 bp, synthetic construct
  source 1..16: mol_type = other DNA
actagatcaaaattca

SEQ ID NO: 1642 - DNA, 16 bp, synthetic construct
  source 1..16: mol_type = other DNA
accaatatccagggaa

SEQ ID NO: 1643 - DNA, 16 bp, synthetic construct
  source 1..16: mol_type = other DNA
acattagtatattcac

SEQ ID NO: 1644 - DNA, 16 bp, synthetic construct
  source 1..16: mol_type = other DNA
actatagtatgatagc

SEQ ID NO: 1645 - DNA, 16 bp, synthetic construct
  source 1..16: mol_type = other DNA
ttttagagacatgccc

SEQ ID NO: 1646 - DNA, 16 bp, synthetic construct
  source 1..16: mol_type = other DNA
acggtatgtaatccag

SEQ ID NO: 1647 - DNA, 16 bp, synthetic construct
  source 1..16: mol_type = other DNA
gcatatgaggtatggg

SEQ ID NO: 1648 - DNA, 16 bp, synthetic construct
  source 1..16: mol_type = other DNA
tggtaaatttcagtgg

SEQ ID NO: 1649 - DNA, 16 bp, synthetic construct
  source 1..16: mol_type = other DNA
attattaagtcaggtc

SEQ ID NO: 1650 - DNA, 16 bp, synthetic construct
  source 1..16: mol_type = other DNA
tggtaacaataattcc

SEQ ID NO: 1651 - DNA, 16 bp, synthetic construct
  source 1..16: mol_type = other DNA
gatttatctacatgta

SEQ ID NO: 1652 - DNA, 16 bp, synthetic construct
  source 1..16: mol_type = other DNA
agctatcaacttgagt

SEQ ID NO: 1653 - DNA, 16 bp, synthetic construct
  source 1..16: mol_type = other DNA
gtaacaaaacctcatt

SEQ ID NO: 1654 - DNA, 16 bp, synthetic construct
  source 1..16: mol_type = other DNA
agaatatctagagtgg

SEQ ID NO: 1655 - DNA, 16 bp, synthetic construct
  source 1..16: mol_type = other DNA
atgtaatatgcccttt

SEQ ID NO: 1656 - DNA, 16 bp, synthetic construct
  source 1..16: mol_type = other DNA
agaactacaaaggtga

SEQ ID NO: 1657 - DNA, 16 bp, synthetic construct
  source 1..16: mol_type = other DNA
actcataaatgaatgg

SEQ ID NO: 1658 - DNA, 16 bp, synthetic construct
  source 1..16: mol_type = other DNA
caccaactaacttcca

SEQ ID NO: 1659 - DNA, 16 bp, synthetic construct
  source 1..16: mol_type = other DNA
gtaaacttaattgtca

SEQ ID NO: 1660 - DNA, 16 bp, synthetic construct
  source 1..16: mol_type = other DNA
tcagtataagattttc

SEQ ID NO: 1661 - DNA, 16 bp, synthetic construct
  source 1..16: mol_type = other DNA
tcagataagagggaga

SEQ ID NO: 1662 - DNA, 16 bp, synthetic construct
  source 1..16: mol_type = other DNA
caaacaatgtattgtc

SEQ ID NO: 1663 - DNA, 16 bp, synthetic construct
  source 1..16: mol_type = other DNA
accgtaactaccttgt

SEQ ID NO: 1664 - DNA, 16 bp, synthetic construct
  source 1..16: mol_type = other DNA
tttgataaggagtcta

SEQ ID NO: 1665 - DNA, 16 bp, synthetic construct
  source 1..16: mol_type = other DNA
agacattaatcaatca

SEQ ID NO: 1666 - DNA, 16 bp, synthetic construct
  source 1..16: mol_type = other DNA
caaacaacttattgag

SEQ ID NO: 1667 - DNA, 16 bp, synthetic construct
  source 1..16: mol_type = other DNA
aattacttcatagtcc

SEQ ID NO: 1668 - DNA, 16 bp, synthetic construct
  source 1..16: mol_type = other DNA
ggtataaggctacagg

SEQ ID NO: 1669 - DNA, 16 bp, synthetic construct
  source 1..16: mol_type = other DNA
tacaatttcagtcctc

SEQ ID NO: 1670 - DNA, 16 bp, synthetic construct
  source 1..16: mol_type = other DNA
actttaagaagggcaa

SEQ ID NO: 1671 - DNA, 16 bp, synthetic construct
  source 1..16: mol_type = other DNA
gatacggcaaaatttc

SEQ ID NO: 1672 - DNA, 16 bp, synthetic construct
  source 1..16: mol_type = other DNA
ttgtagataaagaggc

SEQ ID NO: 1673 - DNA, 16 bp, synthetic construct
  source 1..16: mol_type = other DNA
gcaaattcaacctttc

SEQ ID NO: 1674 - DNA, 16 bp, synthetic construct
  source 1..16: mol_type = other DNA
gcattacaaaggtcct

SEQ ID NO: 1675 - DNA, 16 bp, synthetic construct
  source 1..16: mol_type = other DNA
accaatttgattcatt

SEQ ID NO: 1676 - DNA, 16 bp, synthetic construct
  source 1..16: mol_type = other DNA
ccaatagtaatgccct

SEQ ID NO: 1677 - DNA, 16 bp, synthetic construct
  source 1..16: mol_type = other DNA
gtactataacttttca

SEQ ID NO: 1678 - DNA, 16 bp, synthetic construct
  source 1..16: mol_type = other DNA
aagagtaaggtactat

SEQ ID NO: 1679 - DNA, 16 bp, synthetic construct
  source 1..16: mol_type = other DNA
cccaatcaatagtatc

SEQ ID NO: 1680 - DNA, 16 bp, synthetic construct
  source 1..16: mol_type = other DNA
tgaaatcaacattcca

SEQ ID NO: 1681 - DNA, 16 bp, synthetic construct
  source 1..16: mol_type = other DNA
gaaatttcaatgcact

SEQ ID NO: 1682 - DNA, 16 bp, synthetic construct
  source 1..16: mol_type = other DNA
tcagaatgcaaggcaa

SEQ ID NO: 1683 - DNA, 16 bp, synthetic construct
  source 1..16: mol_type = other DNA
cttaagcatgttccaa

SEQ ID NO: 1684 - DNA, 16 bp, synthetic construct
  source 1..16: mol_type = other DNA
attataggtggagttc

SEQ ID NO: 1685 - DNA, 16 bp, synthetic construct
  source 1..16: mol_type = other DNA
cccaaaccatgtttgg

SEQ ID NO: 1686 - DNA, 16 bp, synthetic construct
  source 1..16: mol_type = other DNA
tctatacatagtacaa

SEQ ID NO: 1687 - DNA, 16 bp, synthetic construct
  source 1..16: mol_type = other DNA
aagatatgggcactcc

SEQ ID NO: 1688 - DNA, 16 bp, synthetic construct
  source 1..16: mol_type = other DNA
aaacatgtgttgacac

SEQ ID NO: 1689 - DNA, 16 bp, synthetic construct
  source 1..16: mol_type = other DNA
cttaattaaaccacta

SEQ ID NO: 1690 - DNA, 16 bp, synthetic construct
  source 1..16: mol_type = other DNA
attatatcttcgcttt

SEQ ID NO: 1691 - DNA, 16 bp, synthetic construct
  source 1..16: mol_type = other DNA
agaatagtacagtcaa

SEQ ID NO: 1692 - DNA, 16 bp, synthetic construct
  source 1..16: mol_type = other DNA
agctaaaatagctatc

SEQ ID NO: 1693 - DNA, 16 bp, synthetic construct
  source 1..16: mol_type = other DNA
ctccattaaccaacat

SEQ ID NO: 1694 - DNA, 16 bp, synthetic construct
  source 1..16: mol_type = other DNA
tcatatggaaggaagt

SEQ ID NO: 1695 - DNA, 16 bp, synthetic construct
  source 1..16: mol_type = other DNA
gcaaagacaatctgta

SEQ ID NO: 1696 - DNA, 16 bp, synthetic construct
  source 1..16: mol_type = other DNA
agaaagttgagtagta

SEQ ID NO: 1697 - DNA, 16 bp, synthetic construct
  source 1..16: mol_type = other DNA
aactataaatacccac

SEQ ID NO: 1698 - DNA, 16 bp, synthetic construct
  source 1..16: mol_type = other DNA
catcaagacgcacagg

SEQ ID NO: 1699 - DNA, 16 bp, synthetic construct
  source 1..16: mol_type = other DNA
ttttacctgtgacact

SEQ ID NO: 1700 - DNA, 16 bp, synthetic construct
  source 1..16: mol_type = other DNA
caaagagtcaatgggc

SEQ ID NO: 1701 - DNA, 16 bp, synthetic construct
  source 1..16: mol_type = other DNA
agattatcaggtagaa

SEQ ID NO: 1702 - DNA, 16 bp, synthetic construct
  source 1..16: mol_type = other DNA
tgcaaagctaaacttc

SEQ ID NO: 1703 - DNA, 16 bp, synthetic construct
  source 1..16: mol_type = other DNA
taaagttactaagact

SEQ ID NO: 1704 - DNA, 16 bp, synthetic construct
  source 1..16: mol_type = other DNA
gctttataaactccat

SEQ ID NO: 1705 - DNA, 16 bp, synthetic construct
  source 1..16: mol_type = other DNA
tatttaatggttcctc

SEQ ID NO: 1706 - DNA, 16 bp, synthetic construct
  source 1..16: mol_type = other DNA
agggtattattgatag

SEQ ID NO: 1707 - DNA, 16 bp, synthetic construct
  source 1..16: mol_type = other DNA
ccattgatataaaaaa

SEQ ID NO: 1708 - DNA, 16 bp, synthetic construct
  source 1..16: mol_type = other DNA
acaaatccacacttac

SEQ ID NO: 1709 - DNA, 16 bp, synthetic construct
  source 1..16: mol_type = other DNA
gcaaagcaaatacatt

SEQ ID NO: 1710 - DNA, 16 bp, synthetic construct
  source 1..16: mol_type = other DNA
gaccaaaagtaacaat

SEQ ID NO: 1711 - DNA, 16 bp, synthetic construct
  source 1..16: mol_type = other DNA
aacaatcctgcgaagt

SEQ ID NO: 1712 - DNA, 16 bp, synthetic construct
  source 1..16: mol_type = other DNA
tgatatcaatggtatg

SEQ ID NO: 1713 - DNA, 16 bp, synthetic construct
  source 1..16: mol_type = other DNA
ccaagagcagacctct

SEQ ID NO: 1714 - DNA, 16 bp, synthetic construct
  source 1..16: mol_type = other DNA
tcacaaaatgtagggt

SEQ ID NO: 1715 - DNA, 16 bp, synthetic construct
  source 1..16: mol_type = other DNA
acaaatgattactcac

SEQ ID NO: 1716 - DNA, 16 bp, synthetic construct
  source 1..16: mol_type = other DNA
acactaacatctgtcc

SEQ ID NO: 1717 - DNA, 16 bp, synthetic construct
  source 1..16: mol_type = other DNA
acaatattcacttaca

SEQ ID NO: 1718 - DNA, 16 bp, synthetic construct
  source 1..16: mol_type = other DNA
caagatatgggcactc

SEQ ID NO: 1719 - DNA, 16 bp, synthetic construct
  source 1..16: mol_type = other DNA
agttaattgctggcat

SEQ ID NO: 1720 - DNA, 16 bp, synthetic construct
  source 1..16: mol_type = other DNA
ccatattcagcacctt

SEQ ID NO: 1721 - DNA, 16 bp, synthetic construct
  source 1..16: mol_type = other DNA
tcctatcatgtagtaa

SEQ ID NO: 1722 - DNA, 16 bp, synthetic construct
  source 1..16: mol_type = other DNA
aaatttcgatgcaaca

SEQ ID NO: 1723 - DNA, 16 bp, synthetic construct
  source 1..16: mol_type = other DNA
agcatatgaggtatgg

SEQ ID NO: 1724 - DNA, 16 bp, synthetic construct
  source 1..16: mol_type = other DNA
gaaaatatggtcttgt

SEQ ID NO: 1725 - DNA, 16 bp, synthetic construct
  source 1..16: mol_type = other DNA
cagaagtaacaaccat

SEQ ID NO: 1726 - DNA, 16 bp, synthetic construct
  source 1..16: mol_type = other DNA
ccaatgtaaacagtaa

SEQ ID NO: 1727 - DNA, 16 bp, synthetic construct
  source 1..16: mol_type = other DNA
cagctatcaacttgag

SEQ ID NO: 1728 - DNA, 16 bp, synthetic construct
  source 1..16: mol_type = other DNA
tcaataaagttgacca

SEQ ID NO: 1729 - DNA, 16 bp, synthetic construct
  source 1..16: mol_type = other DNA
agataatcatgcctca

SEQ ID NO: 1730 - DNA, 16 bp, synthetic construct
  source 1..16: mol_type = other DNA
ctgaaatcaacattcc

SEQ ID NO: 1731 - DNA, 16 bp, synthetic construct
  source 1..16: mol_type = other DNA
aagctatgatcatcac

SEQ ID NO: 1732 - DNA, 16 bp, synthetic construct
  source 1..16: mol_type = other DNA
tttttagagacatgcc

SEQ ID NO: 1733 - DNA, 16 bp, synthetic construct
  source 1..16: mol_type = other DNA
ttagcttagaaggacc

SEQ ID NO: 1734 - DNA, 16 bp, synthetic construct
  source 1..16: mol_type = other DNA
catgtaatatgccctt

SEQ ID NO: 1735 - DNA, 16 bp, synthetic construct
  source 1..16: mol_type = other DNA
ttatcatatgccaacc

SEQ ID NO: 1736 - DNA, 16 bp, synthetic construct
  source 1..16: mol_type = other DNA
tgatatcagttaccaa

SEQ ID NO: 1737 - DNA, 16 bp, synthetic construct
  source 1..16: mol_type = other DNA
gtattatatcttcgct

SEQ ID NO: 1738 - DNA, 16 bp, synthetic construct
  source 1..16: mol_type = other DNA
tacggtatgtaatcca

SEQ ID NO: 1739 - DNA, 16 bp, synthetic construct
  source 1..16: mol_type = other DNA
cgaattgaattattct

SEQ ID NO: 1740 - DNA, 16 bp, synthetic construct
  source 1..16: mol_type = other DNA
tttattataggtggag

SEQ ID NO: 1741 - DNA, 16 bp, synthetic construct
  source 1..16: mol_type = other DNA
ataatcacattccatc

SEQ ID NO: 1742 - DNA, 16 bp, synthetic construct
  source 1..16: mol_type = other DNA
gctataaaagcactgc

SEQ ID NO: 1743 - DNA, 16 bp, synthetic construct
  source 1..16: mol_type = other DNA
ccataaagcacacctg

SEQ ID NO: 1744 - DNA, 16 bp, synthetic construct
  source 1..16: mol_type = other DNA
aggtattaaacagttg

SEQ ID NO: 1745 - DNA, 16 bp, synthetic construct
  source 1..16: mol_type = other DNA
caaaacatgtgttgac

SEQ ID NO: 1746 - DNA, 16 bp, synthetic construct
  source 1..16: mol_type = other DNA
atcaactatgttatgg

SEQ ID NO: 1747 - DNA, 16 bp, synthetic construct
  source 1..16: mol_type = other DNA
tccaagtttagatcta

SEQ ID NO: 1748 - DNA, 16 bp, synthetic construct
  source 1..16: mol_type = other DNA
actatattttggctgg

SEQ ID NO: 1749 - DNA, 16 bp, synthetic construct
  source 1..16: mol_type = other DNA
caccgtaactaccttg

SEQ ID NO: 1750 - DNA, 16 bp, synthetic construct
  source 1..16: mol_type = other DNA
gaaattatgtgactag

SEQ ID NO: 1751 - DNA, 16 bp, synthetic construct
  source 1..16: mol_type = other DNA
caggtattaaagtcta

SEQ ID NO: 1752 - DNA, 16 bp, synthetic construct
  source 1..16: mol_type = other DNA
ccatttcaaacaaggt

SEQ ID NO: 1753 - DNA, 16 bp, synthetic construct
  source 1..16: mol_type = other DNA
cttttacagatcctta

SEQ ID NO: 1754 - DNA, 16 bp, synthetic construct
  source 1..16: mol_type = other DNA
gatacaatttcagtcc

SEQ ID NO: 1755 - DNA, 16 bp, synthetic construct
  source 1..16: mol_type = other DNA
aactacatcagaatgc

SEQ ID NO: 1756 - DNA, 16 bp, synthetic construct
  source 1..16: mol_type = other DNA
ttaataatgtcaagcc

SEQ ID NO: 1757 - DNA, 16 bp, synthetic construct
  source 1..16: mol_type = other DNA
acaaagttcaggcagt

SEQ ID NO: 1758 - DNA, 16 bp, synthetic construct
  source 1..16: mol_type = other DNA
aatgtttaacccatca

SEQ ID NO: 1759 - DNA, 16 bp, synthetic construct
  source 1..16: mol_type = other DNA
aagtagcttatagcca

SEQ ID NO: 1760 - DNA, 16 bp, synthetic construct
  source 1..16: mol_type = other DNA
ccactatggagactgg

SEQ ID NO: 1761 - DNA, 16 bp, synthetic construct
  source 1..16: mol_type = other DNA
atctatacatagtaca

SEQ ID NO: 1762 - DNA, 16 bp, synthetic construct
  source 1..16: mol_type = other DNA
ctttattcaggagagc

SEQ ID NO: 1763 - DNA, 16 bp, synthetic construct
  source 1..16: mol_type = other DNA
ccaataacatccattc

SEQ ID NO: 1764 - DNA, 16 bp, synthetic construct
  source 1..16: mol_type = other DNA
tacctaacttgctgag

SEQ ID NO: 1765 - DNA, 16 bp, synthetic construct
  source 1..16: mol_type = other DNA
gagaaactgctttcgc

SEQ ID NO: 1766 - DNA, 16 bp, synthetic construct
  source 1..16: mol_type = other DNA
cctaaacaattcttca

SEQ ID NO: 1767 - DNA, 16 bp, synthetic construct
  source 1..16: mol_type = other DNA
atcatttgatgccatt

SEQ ID NO: 1768 - DNA, 16 bp, synthetic construct
  source 1..16: mol_type = other DNA
aaacttgatacggcaa

SEQ ID NO: 1769 - DNA, 16 bp, synthetic construct
  source 1..16: mol_type = other DNA
ttaaacctggtcctga

SEQ ID NO: 1770 - DNA, 16 bp, synthetic construct
  source 1..16: mol_type = other DNA
caactataaataccca

SEQ ID NO: 1771 - DNA, 16 bp, synthetic construct
  source 1..16: mol_type = other DNA
tgtaaacttaattgtc

SEQ ID NO: 1772 - DNA, 16 bp, synthetic construct
  source 1..16: mol_type = other DNA
caaagctaaaatagct

SEQ ID NO: 1773 - DNA, 16 bp, synthetic construct
  source 1..16: mol_type = other DNA
tcaaagagtcaatggg

SEQ ID NO: 1774 - DNA, 16 bp, synthetic construct
  source 1..16: mol_type = other DNA
atcatatggaaggaag

SEQ ID NO: 1775 - DNA, 16 bp, synthetic construct
  source 1..16: mol_type = other DNA
gttaaattacagagat

SEQ ID NO: 1776 - DNA, 16 bp, synthetic construct
  source 1..16: mol_type = other DNA
atttagattatcaggt

SEQ ID NO: 1777 - DNA, 16 bp, synthetic construct
  source 1..16: mol_type = other DNA
gagaaagttgagtagt

SEQ ID NO: 1778 - DNA, 16 bp, synthetic construct
  source 1..16: mol_type = other DNA
tcaaatggttacttgg

SEQ ID NO: 1779 - DNA, 16 bp, synthetic construct
  source 1..16: mol_type = other DNA
ctaaagttactaagac

SEQ ID NO: 1780 - DNA, 16 bp, synthetic construct
  source 1..16: mol_type = other DNA
agcaaagacaatctgt

SEQ ID NO: 1781 - DNA, 16 bp, synthetic construct
  source 1..16: mol_type = other DNA
ttaagtgaaactccaa

SEQ ID NO: 1782 - DNA, 16 bp, synthetic construct
  source 1..16: mol_type = other DNA
tctatttaatggttcc

SEQ ID NO: 1783 - DNA, 16 bp, synthetic construct
  source 1..16: mol_type = other DNA
atttaagtaaatctag

SEQ ID NO: 1784 - DNA, 16 bp, synthetic construct
  source 1..16: mol_type = other DNA
tcaaagctaaaatagc

SEQ ID NO: 1785 - DNA, 16 bp, synthetic construct
  source 1..16: mol_type = other DNA
accattgatataaaaa

SEQ ID NO: 1786 - DNA, 16 bp, synthetic construct
  source 1..16: mol_type = other DNA
tgctaggtacaattag

SEQ ID NO: 1787 - DNA, 16 bp, synthetic construct
  source 1..16: mol_type = other DNA
tcacaaatccacactt

SEQ ID NO: 1788 - DNA, 16 bp, synthetic construct
  source 1..16: mol_type = other DNA
acattcaagggtatta

SEQ ID NO: 1789 - DNA, 16 bp, synthetic construct
  source 1..16: mol_type = other DNA
cgatcaaaagaagaat

SEQ ID NO: 1790 - DNA, 16 bp, synthetic construct
  source 1..16: mol_type = other DNA
tgccaacaaatcagta

SEQ ID NO: 1791 - DNA, 16 bp, synthetic construct
  source 1..16: mol_type = other DNA
cccaagagcagacctc

SEQ ID NO: 1792 - DNA, 16 bp, synthetic construct
  source 1..16: mol_type = other DNA
tttacaggcattaaca

SEQ ID NO: 1793 - DNA, 16 bp, synthetic construct
  source 1..16: mol_type = other DNA
gtgatatcaatggtat

SEQ ID NO: 1794 - DNA, 16 bp, synthetic construct
  source 1..16: mol_type = other DNA
aagtatatagccttcc

SEQ ID NO: 1795 - DNA, 16 bp, synthetic construct
  source 1..16: mol_type = other DNA
accaagtaattccttc

SEQ ID NO: 1796 - DNA, 16 bp, synthetic construct
  source 1..16: mol_type = other DNA
gcattacattctccaa

SEQ ID NO: 1797 - DNA, 16 bp, synthetic construct
  source 1..16: mol_type = other DNA
ccagaagtaacaacca

SEQ ID NO: 1798 - DNA, 16 bp, synthetic construct
  source 1..16: mol_type = other DNA
atatcctaagaaccag

SEQ ID NO: 1799 - DNA, 16 bp, synthetic construct
  source 1..16: mol_type = other DNA
caatttcaaagtagtc

SEQ ID NO: 1800 - DNA, 16 bp, synthetic construct
  source 1..16: mol_type = other DNA
gtcaaaaatgcttcag

SEQ ID NO: 1801 - DNA, 16 bp, synthetic construct
  source 1..16: mol_type = other DNA
gctcattagactgagg

SEQ ID NO: 1802 - DNA, 16 bp, synthetic construct
  source 1..16: mol_type = other DNA
acataatcacattcca

SEQ ID NO: 1803 - DNA, 16 bp, synthetic construct
  source 1..16: mol_type = other DNA
gatatacaaaccaacc

SEQ ID NO: 1804 - DNA, 16 bp, synthetic construct
  source 1..16: mol_type = other DNA
attactaaactcttca

SEQ ID NO: 1805 - DNA, 16 bp, synthetic construct
  source 1..16: mol_type = other DNA
gcataatgttactcac

SEQ ID NO: 1806 - DNA, 16 bp, synthetic construct
  source 1..16: mol_type = other DNA
aagataaatagctctc

SEQ ID NO: 1807 - DNA, 16 bp, synthetic construct
  source 1..16: mol_type = other DNA
aagataatcatgcctc

SEQ ID NO: 1808 - DNA, 16 bp, synthetic construct
  source 1..16: mol_type = other DNA
catttttgatgactca

SEQ ID NO: 1809 - DNA, 16 bp, synthetic construct
  source 1..16: mol_type = other DNA
gtaagattacaggtaa

SEQ ID NO: 1810 - DNA, 16 bp, synthetic construct
  source 1..16: mol_type = other DNA
tctattaaagccacta

SEQ ID NO: 1811 - DNA, 16 bp, synthetic construct
  source 1..16: mol_type = other DNA
gccaaggttggaagta

SEQ ID NO: 1812 - DNA, 16 bp, synthetic construct
  source 1..16: mol_type = other DNA
cttaatttggagcttg

SEQ ID NO: 1813 - DNA, 16 bp, synthetic construct
  source 1..16: mol_type = other DNA
tatcatttgatgccat

SEQ ID NO: 1814 - DNA, 16 bp, synthetic construct
  source 1..16: mol_type = other DNA
aagattacagttgtat

SEQ ID NO: 1815 - DNA, 16 bp, synthetic construct
  source 1..16: mol_type = other DNA
gaattcagggcatgtc

SEQ ID NO: 1816 - DNA, 16 bp, synthetic construct
  source 1..16: mol_type = other DNA
caaattgcaaggtcaa

SEQ ID NO: 1817 - DNA, 16 bp, synthetic construct
  source 1..16: mol_type = other DNA
gcaaaacatgtgttga

SEQ ID NO: 1818 - DNA, 16 bp, synthetic construct
  source 1..16: mol_type = other DNA
gcaattaaatacactt

SEQ ID NO: 1819 - DNA, 16 bp, synthetic construct
  source 1..16: mol_type = other DNA
ctacggtatgtaatcc

SEQ ID NO: 1820 - DNA, 16 bp, synthetic construct
  source 1..16: mol_type = other DNA
agtagaatacctgcaa

SEQ ID NO: 1821 - DNA, 16 bp, synthetic construct
  source 1..16: mol_type = other DNA
gattattctgagtccc

SEQ ID NO: 1822 - DNA, 16 bp, synthetic construct
  source 1..16: mol_type = other DNA
ctttattataggtgga

SEQ ID NO: 1823 - DNA, 16 bp, synthetic construct
  source 1..16: mol_type = other DNA
ttccataaagcacacc

SEQ ID NO: 1824 - DNA, 16 bp, synthetic construct
  source 1..16: mol_type = other DNA
agaaaccagggacagc

SEQ ID NO: 1825 - DNA, 16 bp, synthetic construct
  source 1..16: mol_type = other DNA
aaggtatcaaggacac

SEQ ID NO: 1826 - DNA, 16 bp, synthetic construct
  source 1..16: mol_type = other DNA
ctttactattactctc

SEQ ID NO: 1827 - DNA, 16 bp, synthetic construct
  source 1..16: mol_type = other DNA
gcaaatacattggttg

SEQ ID NO: 1828 - DNA, 16 bp, synthetic construct
  source 1..16: mol_type = other DNA
ataagtttcagggtct

SEQ ID NO: 1829 - DNA, 16 bp, synthetic construct
  source 1..16: mol_type = other DNA
cttaataatgtcaagc

SEQ ID NO: 1830 - DNA, 16 bp, synthetic construct
  source 1..16: mol_type = other DNA
caacctataatcctcc

SEQ ID NO: 1831 - DNA, 16 bp, synthetic construct
  source 1..16: mol_type = other DNA
caaacaaggtgtctca

SEQ ID NO: 1832 - DNA, 16 bp, synthetic construct
  source 1..16: mol_type = other DNA
gctataagcatcctca

SEQ ID NO: 1833 - DNA, 16 bp, synthetic construct
  source 1..16: mol_type = other DNA
tagaattacattctgc

SEQ ID NO: 1834 - DNA, 16 bp, synthetic construct
  source 1..16: mol_type = other DNA
actgatatcagttacc

SEQ ID NO: 1835 - DNA, 16 bp, synthetic construct
  source 1..16: mol_type = other DNA
cctaattataacagaa

SEQ ID NO: 1836 - DNA, 16 bp, synthetic construct
  source 1..16: mol_type = other DNA
tacaatcaagtacttt

SEQ ID NO: 1837 - DNA, 16 bp, synthetic construct
  source 1..16: mol_type = other DNA
ggaaattatgtgacta

SEQ ID NO: 1838 - DNA, 16 bp, synthetic construct
  source 1..16: mol_type = other DNA
gcaaacaaagttcagg

SEQ ID NO: 1839 - DNA, 16 bp, synthetic construct
  source 1..16: mol_type = other DNA
cacaatctgatgttga

SEQ ID NO: 1840 - DNA, 16 bp, synthetic construct
  source 1..16: mol_type = other DNA
gtgtattaggtttttc

SEQ ID NO: 1841 - DNA, 16 bp, synthetic construct
  source 1..16: mol_type = other DNA
tcttatgcataccagg

SEQ ID NO: 1842 - DNA, 16 bp, synthetic construct
  source 1..16: mol_type = other DNA
aagtattatatcttcg

SEQ ID NO: 1843 - DNA, 16 bp, synthetic construct
  source 1..16: mol_type = other DNA
cttacctaacttgctg

SEQ ID NO: 1844 - DNA, 16 bp, synthetic construct
  source 1..16: mol_type = other DNA
tctatagggaagtcag

SEQ ID NO: 1845 - DNA, 16 bp, synthetic construct
  source 1..16: mol_type = other DNA
cataccatttcaaaca

SEQ ID NO: 1846 - DNA, 16 bp, synthetic construct
  source 1..16: mol_type = other DNA
gtttaaacctggtcct

SEQ ID NO: 1847 - DNA, 16 bp, synthetic construct
  source 1..16: mol_type = other DNA
agtgaaatagggtaat

SEQ ID NO: 1848 - DNA, 16 bp, synthetic construct
  source 1..16: mol_type = other DNA
taattactcttgttcc

SEQ ID NO: 1849 - DNA, 16 bp, synthetic construct
  source 1..16: mol_type = other DNA
cttaatactaaagtta

SEQ ID NO: 1850 - DNA, 16 bp, synthetic construct
  source 1..16: mol_type = other DNA
tatcatatggaaggaa

SEQ ID NO: 1851 - DNA, 16 bp, synthetic construct
  source 1..16: mol_type = other DNA
aaaatacagctgccac

SEQ ID NO: 1852 - DNA, 16 bp, synthetic construct
  source 1..16: mol_type = other DNA
acaactataaataccc

SEQ ID NO: 1853 - DNA, 16 bp, synthetic construct
  source 1..16: mol_type = other DNA
attaagtgaaactcca

SEQ ID NO: 1854 - DNA, 16 bp, synthetic construct
  source 1..16: mol_type = other DNA
atcaaagagtcaatgg

SEQ ID NO: 1855 - DNA, 16 bp, synthetic construct
  source 1..16: mol_type = other DNA
ggagaaagttgagtag

SEQ ID NO: 1856 - DNA, 16 bp, synthetic construct
  source 1..16: mol_type = other DNA
gagttaaattacagag

SEQ ID NO: 1857 - DNA, 16 bp, synthetic construct
  source 1..16: mol_type = other DNA
aatttagattatcagg

SEQ ID NO: 1858 - DNA, 16 bp, synthetic construct
  source 1..16: mol_type = other DNA
gagcaaagacaatctg

SEQ ID NO: 1859 - DNA, 16 bp, synthetic construct
  source 1..16: mol_type = other DNA
tcgatcacatccccct

SEQ ID NO: 1860 - DNA, 16 bp, synthetic construct
  source 1..16: mol_type = other DNA
ttctatttaatggttc

SEQ ID NO: 1861 - DNA, 16 bp, synthetic construct
  source 1..16: mol_type = other DNA
gatttaagtaaatcta

SEQ ID NO: 1862 - DNA, 16 bp, synthetic construct
  source 1..16: mol_type = other DNA
aggaaaataaccattg

SEQ ID NO: 1863 - DNA, 16 bp, synthetic construct
  source 1..16: mol_type = other DNA
tctaagtttcacaaat

SEQ ID NO: 1864 - DNA, 16 bp, synthetic construct
  source 1..16: mol_type = other DNA
aaaacagtactgtgct

SEQ ID NO: 1865 - DNA, 16 bp, synthetic construct
  source 1..16: mol_type = other DNA
ctgaaatcaaagagtc

SEQ ID NO: 1866 - DNA, 16 bp, synthetic construct
  source 1..16: mol_type = other DNA
taatccattgacattc

SEQ ID NO: 1867 - DNA, 16 bp, synthetic construct
  source 1..16: mol_type = other DNA
tggcattacattctcc

SEQ ID NO: 1868 - DNA, 16 bp, synthetic construct
  source 1..16: mol_type = other DNA
gctttatcaacacatg

SEQ ID NO: 1869 - DNA, 16 bp, synthetic construct
  source 1..16: mol_type = other DNA
gatcaacaaatgccaa

SEQ ID NO: 1870 - DNA, 16 bp, synthetic construct
  source 1..16: mol_type = other DNA
tgtactaagcacttcc

SEQ ID NO: 1871 - DNA, 16 bp, synthetic construct
  source 1..16: mol_type = other DNA
cataccaaagtgatat

SEQ ID NO: 1872 - DNA, 16 bp, synthetic construct
  source 1..16: mol_type = other DNA
aaaacaaagttctctc

SEQ ID NO: 1873 - DNA, 16 bp, synthetic construct
  source 1..16: mol_type = other DNA
tatatggtatcaagga

SEQ ID NO: 1874 - DNA, 16 bp, synthetic construct
  source 1..16: mol_type = other DNA
taacccattttgccca

SEQ ID NO: 1875 - DNA, 16 bp, synthetic construct
  source 1..16: mol_type = other DNA
ggctataagcatcctc

SEQ ID NO: 1876 - DNA, 16 bp, synthetic construct
  source 1..16: mol_type = other DNA
actgattaaggacaaa

SEQ ID NO: 1877 - DNA, 16 bp, synthetic construct
  source 1..16: mol_type = other DNA
tttactcaaggtcagc

SEQ ID NO: 1878 - DNA, 16 bp, synthetic construct
  source 1..16: mol_type = other DNA
ccaatattcagattcc

SEQ ID NO: 1879 - DNA, 16 bp, synthetic construct
  source 1..16: mol_type = other DNA
gcacaatctgatgttg

SEQ ID NO: 1880 - DNA, 16 bp, synthetic construct
  source 1..16: mol_type = other DNA
tacaatgacagtgctg

SEQ ID NO: 1881 - DNA, 16 bp, synthetic construct
  source 1..16: mol_type = other DNA
gaatctaaatgatcaa

SEQ ID NO: 1882 - DNA, 16 bp, synthetic construct
  source 1..16: mol_type = other DNA
gacaagattcatttct

SEQ ID NO: 1883 - DNA, 16 bp, synthetic construct
  source 1..16: mol_type = other DNA
tttattcacaatctcg

SEQ ID NO: 1884 - DNA, 16 bp, synthetic construct
  source 1..16: mol_type = other DNA
tgatattttgacctaa

SEQ ID NO: 1885 - DNA, 16 bp, synthetic construct
  source 1..16: mol_type = other DNA
tctctattaaagccac

SEQ ID NO: 1886 - DNA, 16 bp, synthetic construct
  source 1..16: mol_type = other DNA
accaagattacagttg

SEQ ID NO: 1887 - DNA, 16 bp, synthetic construct
  source 1..16: mol_type = other DNA
ccagtagaatacctgc

SEQ ID NO: 1888 - DNA, 16 bp, synthetic construct
  source 1..16: mol_type = other DNA
tgcaaaacatgtgttg

SEQ ID NO: 1889 - DNA, 16 bp, synthetic construct
  source 1..16: mol_type = other DNA
actaccagcattccta

SEQ ID NO: 1890 - DNA, 16 bp, synthetic construct
  source 1..16: mol_type = other DNA
ccaattatgttacctt

SEQ ID NO: 1891 - DNA, 16 bp, synthetic construct
  source 1..16: mol_type = other DNA
gcatatcctaagaacc

SEQ ID NO: 1892 - DNA, 16 bp, synthetic construct
  source 1..16: mol_type = other DNA
aatacttcagaccagt

SEQ ID NO: 1893 - DNA, 16 bp, synthetic construct
  source 1..16: mol_type = other DNA
attacaatcaagtact

SEQ ID NO: 1894 - DNA, 16 bp, synthetic construct
  source 1..16: mol_type = other DNA
atcaatagcagagttg

SEQ ID NO: 1895 - DNA, 16 bp, synthetic construct
  source 1..16: mol_type = other DNA
gcttttagaataggta

SEQ ID NO: 1896 - DNA, 16 bp, synthetic construct
  source 1..16: mol_type = other DNA
aactgtacaactatca

SEQ ID NO: 1897 - DNA, 16 bp, synthetic construct
  source 1..16: mol_type = other DNA
gcagaattcagggcat

SEQ ID NO: 1898 - DNA, 16 bp, synthetic construct
  source 1..16: mol_type = other DNA
cacatatcaaggccgc

SEQ ID NO: 1899 - DNA, 16 bp, synthetic construct
  source 1..16: mol_type = other DNA
acaataaaagctttgc

SEQ ID NO: 1900 - DNA, 16 bp, synthetic construct
  source 1..16: mol_type = other DNA
atcattggagtgaggg

SEQ ID NO: 1901 - DNA, 16 bp, synthetic construct
  source 1..16: mol_type = other DNA
actttttagggtcata

SEQ ID NO: 1902 - DNA, 16 bp, synthetic construct
  source 1..16: mol_type = other DNA
acaaatgcaggcctgg

SEQ ID NO: 1903 - DNA, 16 bp, synthetic construct
  source 1..16: mol_type = other DNA
atcaagataatcatgc

SEQ ID NO: 1904 - DNA, 16 bp, synthetic construct
  source 1..16: mol_type = other DNA
gctactaacataatca

SEQ ID NO: 1905 - DNA, 16 bp, synthetic construct
  source 1..16: mol_type = other DNA
gatcatttatctggct

SEQ ID NO: 1906 - DNA, 16 bp, synthetic construct
  source 1..16: mol_type = other DNA
ctttatagacatctca

SEQ ID NO: 1907 - DNA, 16 bp, synthetic construct
  source 1..16: mol_type = other DNA
atattttgatctgagg

SEQ ID NO: 1908 - DNA, 16 bp, synthetic construct
  source 1..16: mol_type = other DNA
agtaagattacaggta

SEQ ID NO: 1909 - DNA, 16 bp, synthetic construct
  source 1..16: mol_type = other DNA
ccttttgaaaatcctc

SEQ ID NO: 1910 - DNA, 16 bp, synthetic construct
  source 1..16: mol_type = other DNA
gagtattttgagatat

SEQ ID NO: 1911 - DNA, 16 bp, synthetic construct
  source 1..16: mol_type = other DNA
atctatagggaagtca

SEQ ID NO: 1912 - DNA, 16 bp, synthetic construct
  source 1..16: mol_type = other DNA
agcataatgttactca

SEQ ID NO: 1913 - DNA, 16 bp, synthetic construct
  source 1..16: mol_type = other DNA
aagtattaaccaccat

SEQ ID NO: 1914 - DNA, 16 bp, synthetic construct
  source 1..16: mol_type = other DNA
cgcaaacaaagttcag

SEQ ID NO: 1915 - DNA, 16 bp, synthetic construct
  source 1..16: mol_type = other DNA
gattactaaactcttc

SEQ ID NO: 1916 - DNA, 16 bp, synthetic construct
  source 1..16: mol_type = other DNA
tccttaataatgtcaa

SEQ ID NO: 1917 - DNA, 16 bp, synthetic construct
  source 1..16: mol_type = other DNA
tccaagaagtcagtga

SEQ ID NO: 1918 - DNA, 16 bp, synthetic construct
  source 1..16: mol_type = other DNA
attagttaagtgacag

SEQ ID NO: 1919 - DNA, 16 bp, synthetic construct
  source 1..16: mol_type = other DNA
atctatctcactcctc

SEQ ID NO: 1920 - DNA, 16 bp, synthetic construct
  source 1..16: mol_type = other DNA
tctttattataggtgg

SEQ ID NO: 1921 - DNA, 16 bp, synthetic construct
  source 1..16: mol_type = other DNA
ccaaagcatacatgtt

SEQ ID NO: 1922 - DNA, 16 bp, synthetic construct
  source 1..16: mol_type = other DNA
catccgagaaaccagg

SEQ ID NO: 1923 - DNA, 16 bp, synthetic construct
  source 1..16: mol_type = other DNA
atgctataatgatggc

SEQ ID NO: 1924 - DNA, 16 bp, synthetic construct
  source 1..16: mol_type = other DNA
actttaagtgctctta

SEQ ID NO: 1925 - DNA, 16 bp, synthetic construct
  source 1..16: mol_type = other DNA
aacagtgaaatagggt

SEQ ID NO: 1926 - DNA, 16 bp, synthetic construct
  source 1..16: mol_type = other DNA
gaaaatacagctgcca

SEQ ID NO: 1927 - DNA, 16 bp, synthetic construct
  source 1..16: mol_type = other DNA
cacagaaaaggtgcat

SEQ ID NO: 1928 - DNA, 16 bp, synthetic construct
  source 1..16: mol_type = other DNA
taatttagattatcag

SEQ ID NO: 1929 - DNA, 16 bp, synthetic construct
  source 1..16: mol_type = other DNA
atactatttaaactcc

SEQ ID NO: 1930 - DNA, 16 bp, synthetic construct
  source 1..16: mol_type = other DNA
gtacagagctttcagc

SEQ ID NO: 1931 - DNA, 16 bp, synthetic construct
  source 1..16: mol_type = other DNA
ttatcatatggaagga

SEQ ID NO: 1932 - DNA, 16 bp, synthetic construct
  source 1..16: mol_type = other DNA
cattttgagtagacag

SEQ ID NO: 1933 - DNA, 16 bp, synthetic construct
  source 1..16: mol_type = other DNA
ctaattactcttgttc

SEQ ID NO: 1934 - DNA, 16 bp, synthetic construct
  source 1..16: mol_type = other DNA
tcagagaatctttgtc

SEQ ID NO: 1935 - DNA, 16 bp, synthetic construct
  source 1..16: mol_type = other DNA
aaagtttaaacctggt

SEQ ID NO: 1936 - DNA, 16 bp, synthetic construct
  source 1..16: mol_type = other DNA
ttcgatcacatccccc

SEQ ID NO: 1937 - DNA, 16 bp, synthetic construct
  source 1..16: mol_type = other DNA
cttctatttaatggtt

SEQ ID NO: 1938 - DNA, 16 bp, synthetic construct
  source 1..16: mol_type = other DNA
atcgaaccatcttttg

SEQ ID NO: 1939 - DNA, 16 bp, synthetic construct
  source 1..16: mol_type = other DNA
aaggaaaataaccatt

SEQ ID NO: 1940 - DNA, 16 bp, synthetic construct
  source 1..16: mol_type = other DNA
gatctaagtttcacaa

SEQ ID NO: 1941 - DNA, 16 bp, synthetic construct
  source 1..16: mol_type = other DNA
aaatgattctggcttc

SEQ ID NO: 1942 - DNA, 16 bp, synthetic construct
  source 1..16: mol_type = other DNA
gtggagaatttaatcc

SEQ ID NO: 1943 - DNA, 16 bp, synthetic construct
  source 1..16: mol_type = other DNA
ttcttgaaaacagacc

SEQ ID NO: 1944 - DNA, 16 bp, synthetic construct
  source 1..16: mol_type = other DNA
agaaaaggatttaagt

SEQ ID NO: 1945 - DNA, 16 bp, synthetic construct
  source 1..16: mol_type = other DNA
gtccaaagcctgcttc

SEQ ID NO: 1946 - DNA, 16 bp, synthetic construct
  source 1..16: mol_type = other DNA
ctctgggaggttgtat

SEQ ID NO: 1947 - DNA, 16 bp, synthetic construct
  source 1..16: mol_type = other DNA
atagttagtgtgtact

SEQ ID NO: 1948 - DNA, 16 bp, synthetic construct
  source 1..16: mol_type = other DNA
tcataccaaagtgata

SEQ ID NO: 1949 - DNA, 16 bp, synthetic construct
  source 1..16: mol_type = other DNA
gaaaacaaagttctct

SEQ ID NO: 1950 - DNA, 16 bp, synthetic construct
  source 1..16: mol_type = other DNA
aagcagaattcagggc

SEQ ID NO: 1951 - DNA, 16 bp, synthetic construct
  source 1..16: mol_type = other DNA
catattttgatctgag

SEQ ID NO: 1952 - DNA, 16 bp, synthetic construct
  source 1..16: mol_type = other DNA
aatctaaatttgtgtc

SEQ ID NO: 1953 - DNA, 16 bp, synthetic construct
  source 1..16: mol_type = other DNA
aacaaatgcaggcctg

SEQ ID NO: 1954 - DNA, 16 bp, synthetic construct
  source 1..16: mol_type = other DNA
cttacatcaatttaca

SEQ ID NO: 1955 - DNA, 16 bp, synthetic construct
  source 1..16: mol_type = other DNA
gatattggtaaaagca

SEQ ID NO: 1956 - DNA, 16 bp, synthetic construct
  source 1..16: mol_type = other DNA
gcagattctaatgtag

SEQ ID NO: 1957 - DNA, 16 bp, synthetic construct
  source 1..16: mol_type = other DNA
tgaaaacagtactgtg

SEQ ID NO: 1958 - DNA, 16 bp, synthetic construct
  source 1..16: mol_type = other DNA
aatacaaagtgtacca

SEQ ID NO: 1959 - DNA, 16 bp, synthetic construct
  source 1..16: mol_type = other DNA
gacattaaacagtcac

SEQ ID NO: 1960 - DNA, 16 bp, synthetic construct
  source 1..16: mol_type = other DNA
cagacctaaagtttga

SEQ ID NO: 1961 - DNA, 16 bp, synthetic construct
  source 1..16: mol_type = other DNA
tcattatcgacagtat

SEQ ID NO: 1962 - DNA, 16 bp, synthetic construct
  source 1..16: mol_type = other DNA
tcaatacatcatcata

SEQ ID NO: 1963 - DNA, 16 bp, synthetic construct
  source 1..16: mol_type = other DNA
gataattaactgctcc

SEQ ID NO: 1964 - DNA, 16 bp, synthetic construct
  source 1..16: mol_type = other DNA
taaagtattaaccacc

SEQ ID NO: 1965 - DNA, 16 bp, synthetic construct
  source 1..16: mol_type = other DNA
gttatttaaaaggagg

SEQ ID NO: 1966 - DNA, 16 bp, synthetic construct
  source 1..16: mol_type = other DNA
gccttaaaactttcca

SEQ ID NO: 1967 - DNA, 16 bp, synthetic construct
  source 1..16: mol_type = other DNA
ctatatatactgtctg

SEQ ID NO: 1968 - DNA, 16 bp, synthetic construct
  source 1..16: mol_type = other DNA
tctttatagacatctc

SEQ ID NO: 1969 - DNA, 16 bp, synthetic construct
  source 1..16: mol_type = other DNA
gataattcttaagtgg

SEQ ID NO: 1970 - DNA, 16 bp, synthetic construct
  source 1..16: mol_type = other DNA
ccacatatcaaggccg

SEQ ID NO: 1971 - DNA, 16 bp, synthetic construct
  source 1..16: mol_type = other DNA
gaagtaagattacagg

SEQ ID NO: 1972 - DNA, 16 bp, synthetic construct
  source 1..16: mol_type = other DNA
gactatctcattgcca

SEQ ID NO: 1973 - DNA, 16 bp, synthetic construct
  source 1..16: mol_type = other DNA
cttgaaatatggtctt

SEQ ID NO: 1974 - DNA, 16 bp, synthetic construct
  source 1..16: mol_type = other DNA
gatatattgagtattc

SEQ ID NO: 1975 - DNA, 16 bp, synthetic construct
  source 1..16: mol_type = other DNA
tctatttaaagaccaa

SEQ ID NO: 1976 - DNA, 16 bp, synthetic construct
  source 1..16: mol_type = other DNA
gaatttctatcagtcc

SEQ ID NO: 1977 - DNA, 16 bp, synthetic construct
  source 1..16: mol_type = other DNA
cctatttcaatgcatt

SEQ ID NO: 1978 - DNA, 16 bp, synthetic construct
  source 1..16: mol_type = other DNA
ctatataagcatgctc

SEQ ID NO: 1979 - DNA, 16 bp, synthetic construct
  source 1..16: mol_type = other DNA
aattatgttacagctg

SEQ ID NO: 1980 - DNA, 16 bp, synthetic construct
  source 1..16: mol_type = other DNA
gaaaatgtatgactcc

SEQ ID NO: 1981 - DNA, 16 bp, synthetic construct
  source 1..16: mol_type = other DNA
atcaaacatgatctca

SEQ ID NO: 1982 - DNA, 16 bp, synthetic construct
  source 1..16: mol_type = other DNA
gtacataagtgtacaa

SEQ ID NO: 1983 - DNA, 16 bp, synthetic construct
  source 1..16: mol_type = other DNA
ccatttagtaacagaa

SEQ ID NO: 1984 - DNA, 16 bp, synthetic construct
  source 1..16: mol_type = other DNA
aactaccagcattcct

SEQ ID NO: 1985 - DNA, 16 bp, synthetic construct
  source 1..16: mol_type = other DNA
accttttaagattcag

SEQ ID NO: 1986 - DNA, 16 bp, synthetic construct
  source 1..16: mol_type = other DNA
ctttattgtgaattcc

SEQ ID NO: 1987 - DNA, 16 bp, synthetic construct
  source 1..16: mol_type = other DNA
ctcaaggaataattgc

SEQ ID NO: 1988 - DNA, 16 bp, synthetic construct
  source 1..16: mol_type = other DNA
cataattctttgctcc

SEQ ID NO: 1989 - DNA, 16 bp, synthetic construct
  source 1..16: mol_type = other DNA
cctaatacacactgga

SEQ ID NO: 1990 - DNA, 16 bp, synthetic construct
  source 1..16: mol_type = other DNA
gatgttaaaaggtaca

SEQ ID NO: 1991 - DNA, 16 bp, synthetic construct
  source 1..16: mol_type = other DNA
gtatatagaaacacca

SEQ ID NO: 1992 - DNA, 16 bp, synthetic construct
  source 1..16: mol_type = other DNA
tttacttatgctggga

SEQ ID NO: 1993 - DNA, 16 bp, synthetic construct
  source 1..16: mol_type = other DNA
ataatgaagatagcca

SEQ ID NO: 1994 - DNA, 16 bp, synthetic construct
  source 1..16: mol_type = other DNA
catacattaaaggcag

SEQ ID NO: 1995 - DNA, 16 bp, synthetic construct
  source 1..16: mol_type = other DNA
tctaaattcacctctt

SEQ ID NO: 1996 - DNA, 16 bp, synthetic construct
  source 1..16: mol_type = other DNA
gaggataatctaaccc

SEQ ID NO: 1997 - DNA, 16 bp, synthetic construct
  source 1..16: mol_type = other DNA
gactttaagtgctctt

SEQ ID NO: 1998 - DNA, 16 bp, synthetic construct
  source 1..16: mol_type = other DNA
tcatatcacactgatt

SEQ ID NO: 1999 - DNA, 16 bp, synthetic construct
  source 1..16: mol_type = other DNA
ccattttgagtagaca

SEQ ID NO: 2000 - DNA, 16 bp, synthetic construct
  source 1..16: mol_type = other DNA
caaacaactaaggcca

SEQ ID NO: 2001 - DNA, 16 bp, synthetic construct
  source 1..16: mol_type = other DNA
cttgattgagttgtac

SEQ ID NO: 2002 - DNA, 16 bp, synthetic construct
  source 1..16: mol_type = other DNA
gaaatcacgatcccct

SEQ ID NO: 2003 - DNA, 16 bp, synthetic construct
  source 1..16: mol_type = other DNA
gatactatttaaactc

SEQ ID NO: 2004 - DNA, 16 bp, synthetic construct
  source 1..16: mol_type = other DNA
tttacttgaacaacag

SEQ ID NO: 2005 - DNA, 16 bp, synthetic construct
  source 1..16: mol_type = other DNA
ctaaacttcttctgag

SEQ ID NO: 2006 - DNA, 16 bp, synthetic construct
  source 1..16: mol_type = other DNA
ccaaacaaatgtctct

SEQ ID NO: 2007 - DNA, 16 bp, synthetic construct
  source 1..16: mol_type = other DNA
aaagaactgttccctt

SEQ ID NO: 2008 - DNA, 16 bp, synthetic construct
  source 1..16: mol_type = other DNA
gatttatcatatggaa

SEQ ID NO: 2009 - DNA, 16 bp, synthetic construct
  source 1..16: mol_type = other DNA
tatcattggagtgagg

SEQ ID NO: 2010 - DNA, 16 bp, synthetic construct
  source 1..16: mol_type = other DNA
gtctaattactcttgt

SEQ ID NO: 2011 - DNA, 16 bp, synthetic construct
  source 1..16: mol_type = other DNA
gataatttagattatc

SEQ ID NO: 2012 - DNA, 16 bp, synthetic construct
  source 1..16: mol_type = other DNA
gcaaaggtaaaatacg

SEQ ID NO: 2013 - DNA, 16 bp, synthetic construct
  source 1..16: mol_type = other DNA
tgcttcgatcacatcc

SEQ ID NO: 2014 - DNA, 16 bp, synthetic construct
  source 1..16: mol_type = other DNA
tttaatgcgctgttgt

SEQ ID NO: 2015 - DNA, 16 bp, synthetic construct
  source 1..16: mol_type = other DNA
attagctcatggaaag

SEQ ID NO: 2016 - DNA, 16 bp, synthetic construct
  source 1..16: mol_type = other DNA
tatcgaaccatctttt

SEQ ID NO: 2017 - DNA, 16 bp, synthetic construct
  source 1..16: mol_type = other DNA
tttatataaacctaag

SEQ ID NO: 2018 - DNA, 16 bp, synthetic construct
  source 1..16: mol_type = other DNA
ctttcataataaggaa

SEQ ID NO: 2019 - DNA, 16 bp, synthetic construct
  source 1..16: mol_type = other DNA
atcatttggcacttaa

SEQ ID NO: 2020 - DNA, 16 bp, synthetic construct
  source 1..16: mol_type = other DNA
agccagtctatatctt

SEQ ID NO: 2021 - DNA, 16 bp, synthetic construct
  source 1..16: mol_type = other DNA
agaacttagtttcttg

SEQ ID NO: 2022 - DNA, 16 bp, synthetic construct
  source 1..16: mol_type = other DNA
gtaaagacagatcttg

SEQ ID NO: 2023 - DNA, 16 bp, synthetic construct
  source 1..16: mol_type = other DNA
tatttattgtcctgtt

SEQ ID NO: 2024 - DNA, 16 bp, synthetic construct
  source 1..16: mol_type = other DNA
ccatgaatgtctctgg

SEQ ID NO: 2025 - DNA, 16 bp, synthetic construct
  source 1..16: mol_type = other DNA
gacaaaaacgatagtt

SEQ ID NO: 2026 - DNA, 16 bp, synthetic construct
  source 1..16: mol_type = other DNA
agtaccagctcatacc

SEQ ID NO: 2027 - DNA, 16 bp, synthetic construct
  source 1..16: mol_type = other DNA
gcttaagaggaaaaca

SEQ ID NO: 2028 - DNA, 16 bp, synthetic construct
  source 1..16: mol_type = other DNA
acaggtaaacaagcag

SEQ ID NO: 2029 - DNA, 16 bp, synthetic construct
  source 1..16: mol_type = other DNA
cctatgaaaacagtac

SEQ ID NO: 2030 - DNA, 16 bp, synthetic construct
  source 1..16: mol_type = other DNA
agagtaacaatgtacc

SEQ ID NO: 2031 - DNA, 16 bp, synthetic construct
  source 1..16: mol_type = other DNA
gtggataaagctgtgg

SEQ ID NO: 2032 - DNA, 16 bp, synthetic construct
  source 1..16: mol_type = other DNA
gcagattataggcaag

SEQ ID NO: 2033 - DNA, 16 bp, synthetic construct
  source 1..16: mol_type = other DNA
ggatctaagtttcaca

SEQ ID NO: 2034 - DNA, 16 bp, synthetic construct
  source 1..16: mol_type = other DNA
gctaagagacctctgc

SEQ ID NO: 2035 - DNA, 16 bp, synthetic construct
  source 1..16: mol_type = other DNA
atcctaatacacactg

SEQ ID NO: 2036 - DNA, 16 bp, synthetic construct
  source 1..16: mol_type = other DNA
actatataagcatgct

SEQ ID NO: 2037 - DNA, 16 bp, synthetic construct
  source 1..16: mol_type = other DNA
aacttttgatgacagg

SEQ ID NO: 2038 - DNA, 16 bp, synthetic construct
  source 1..16: mol_type = other DNA
catgttagatgtgtga

SEQ ID NO: 2039 - DNA, 16 bp, synthetic construct
  source 1..16: mol_type = other DNA
tctgatagaaggtggt

SEQ ID NO: 2040 - DNA, 16 bp, synthetic construct
  source 1..16: mol_type = other DNA
ttaatctaaacaactt

SEQ ID NO: 2041 - DNA, 16 bp, synthetic construct
  source 1..16: mol_type = other DNA
caaatttgcaatgcaa

SEQ ID NO: 2042 - DNA, 16 bp, synthetic construct
  source 1..16: mol_type = other DNA
gcagaatgtgtatatc

SEQ ID NO: 2043 - DNA, 16 bp, synthetic construct
  source 1..16: mol_type = other DNA
tgaatacaaagtgtac

SEQ ID NO: 2044 - DNA, 16 bp, synthetic construct
  source 1..16: mol_type = other DNA
gaatctaaatttgtgt

SEQ ID NO: 2045 - DNA, 16 bp, synthetic construct
  source 1..16: mol_type = other DNA
acaaatgccattctgg

SEQ ID NO: 2046 - DNA, 16 bp, synthetic construct
  source 1..16: mol_type = other DNA
ggtatatagaaacacc

SEQ ID NO: 2047 - DNA, 16 bp, synthetic construct
  source 1..16: mol_type = other DNA
tacgaatctatctcta

SEQ ID NO: 2048 - DNA, 16 bp, synthetic construct
  source 1..16: mol_type = other DNA
ctcagagaaggaaggt

SEQ ID NO: 2049 - DNA, 16 bp, synthetic construct
  source 1..16: mol_type = other DNA
caaacaaatgcaggcc

SEQ ID NO: 2050 - DNA, 16 bp, synthetic construct
  source 1..16: mol_type = other DNA
ataaacactgggccac

SEQ ID NO: 2051 - DNA, 16 bp, synthetic construct
  source 1..16: mol_type = other DNA
tcaattatgaatgtcc

SEQ ID NO: 2052 - DNA, 16 bp, synthetic construct
  source 1..16: mol_type = other DNA
caactaccagcattcc

SEQ ID NO: 2053 - DNA, 16 bp, synthetic construct
  source 1..16: mol_type = other DNA
acagaattgtgtgttc

SEQ ID NO: 2054 - DNA, 16 bp, synthetic construct
  source 1..16: mol_type = other DNA
aatgtaagaccactcc

SEQ ID NO: 2055 - DNA, 16 bp, synthetic construct
  source 1..16: mol_type = other DNA
agtaaaatctggttca

SEQ ID NO: 2056 - DNA, 16 bp, synthetic construct
  source 1..16: mol_type = other DNA
atgtataatgctctga

SEQ ID NO: 2057 - DNA, 16 bp, synthetic construct
  source 1..16: mol_type = other DNA
gatttatttgactatg

SEQ ID NO: 2058 - DNA, 16 bp, synthetic construct
  source 1..16: mol_type = other DNA
cacaaatatctactgc

SEQ ID NO: 2059 - DNA, 16 bp, synthetic construct
  source 1..16: mol_type = other DNA
ggcataaagacagtag

SEQ ID NO: 2060 - DNA, 16 bp, synthetic construct
  source 1..16: mol_type = other DNA
taaactcagaccacag

SEQ ID NO: 2061 - DNA, 16 bp, synthetic construct
  source 1..16: mol_type = other DNA
ccaacaaaacagcacc

SEQ ID NO: 2062 - DNA, 16 bp, synthetic construct
  source 1..16: mol_type = other DNA
ctagtatcaaccagtc

SEQ ID NO: 2063 - DNA, 16 bp, synthetic construct
  source 1..16: mol_type = other DNA
gtaattatgttacagc

SEQ ID NO: 2064 - DNA, 16 bp, synthetic construct
  source 1..16: mol_type = other DNA
tttaattagttgttgg

SEQ ID NO: 2065 - DNA, 16 bp, synthetic construct
  source 1..16: mol_type = other DNA
cattattataggtacc

SEQ ID NO: 2066 - DNA, 16 bp, synthetic construct
  source 1..16: mol_type = other DNA
cacttatgaatttcta

SEQ ID NO: 2067 - DNA, 16 bp, synthetic construct
  source 1..16: mol_type = other DNA
gcaaattttgctcgag

SEQ ID NO: 2068 - DNA, 16 bp, synthetic construct
  source 1..16: mol_type = other DNA
cccaagaatgcttcct

SEQ ID NO: 2069 - DNA, 16 bp, synthetic construct
  source 1..16: mol_type = other DNA
agaaatacaggcactc

SEQ ID NO: 2070 - DNA, 16 bp, synthetic construct
  source 1..16: mol_type = other DNA
ataatcattatcgaca

SEQ ID NO: 2071 - DNA, 16 bp, synthetic construct
  source 1..16: mol_type = other DNA
acattagtttacttgt

SEQ ID NO: 2072 - DNA, 16 bp, synthetic construct
  source 1..16: mol_type = other DNA
actactaaaactcaag

SEQ ID NO: 2073 - DNA, 16 bp, synthetic construct
  source 1..16: mol_type = other DNA
agaaagcatgtagtta

SEQ ID NO: 2074 - DNA, 16 bp, synthetic construct
  source 1..16: mol_type = other DNA
cccaaacaaatgtctc

SEQ ID NO: 2075 - DNA, 16 bp, synthetic construct
  source 1..16: mol_type = other DNA
caccttttaagattca

SEQ ID NO: 2076 - DNA, 16 bp, synthetic construct
  source 1..16: mol_type = other DNA
gtaaagaactgttccc

SEQ ID NO: 2077 - DNA, 16 bp, synthetic construct
  source 1..16: mol_type = other DNA
ataatcagtcctatga

SEQ ID NO: 2078 - DNA, 16 bp, synthetic construct
  source 1..16: mol_type = other DNA
ctgataatttagatta

SEQ ID NO: 2079 - DNA, 16 bp, synthetic construct
  source 1..16: mol_type = other DNA
gaaatgattctggctt

SEQ ID NO: 2080 - DNA, 16 bp, synthetic construct
  source 1..16: mol_type = other DNA
cagtaagctcaaacaa

SEQ ID NO: 2081 - DNA, 16 bp, synthetic construct
  source 1..16: mol_type = other DNA
cacaataaatgtactc

SEQ ID NO: 2082 - DNA, 16 bp, synthetic construct
  source 1..16: mol_type = other DNA
aggtaggaggcccaga

SEQ ID NO: 2083 - DNA, 16 bp, synthetic construct
  source 1..16: mol_type = other DNA
gctaaacttcttctga

SEQ ID NO: 2084 - DNA, 16 bp, synthetic construct
  source 1..16: mol_type = other DNA
tctgaaatcacgatcc

SEQ ID NO: 2085 - DNA, 16 bp, synthetic construct
  source 1..16: mol_type = other DNA
cctgtaaaagccagca

SEQ ID NO: 2086 - DNA, 16 bp, synthetic construct
  source 1..16: mol_type = other DNA
ttgtaataagcccaaa

SEQ ID NO: 2087 - DNA, 16 bp, synthetic construct
  source 1..16: mol_type = other DNA
aaccattttgagtaga

SEQ ID NO: 2088 - DNA, 16 bp, synthetic construct
  source 1..16: mol_type = other DNA
accctaaatggaaagc

SEQ ID NO: 2089 - DNA, 16 bp, synthetic construct
  source 1..16: mol_type = other DNA
gctaagctagcacttg

SEQ ID NO: 2090 - DNA, 16 bp, synthetic construct
  source 1..16: mol_type = other DNA
ctttaatgcgctgttg

SEQ ID NO: 2091 - DNA, 16 bp, synthetic construct
  source 1..16: mol_type = other DNA
tattagctcatggaaa

SEQ ID NO: 2092 - DNA, 16 bp, synthetic construct
  source 1..16: mol_type = other DNA
ttatcgaaccatcttt

SEQ ID NO: 2093 - DNA, 16 bp, synthetic construct
  source 1..16: mol_type = other DNA
gctgcttcgatcacat

SEQ ID NO: 2094 - DNA, 16 bp, synthetic construct
  source 1..16: mol_type = other DNA
gatacataatttctca

SEQ ID NO: 2095 - DNA, 16 bp, synthetic construct
  source 1..16: mol_type = other DNA
ctttcatagttaaaag

SEQ ID NO: 2096 - DNA, 16 bp, synthetic construct
  source 1..16: mol_type = other DNA
atgttttggatctaag

SEQ ID NO: 2097 - DNA, 16 bp, synthetic construct
  source 1..16: mol_type = other DNA
aacctatgaaaacagt

SEQ ID NO: 2098 - DNA, 16 bp, synthetic construct
  source 1..16: mol_type = other DNA
tcaaacagtctgtctc

SEQ ID NO: 2099 - DNA, 16 bp, synthetic construct
  source 1..16: mol_type = other DNA
acaggtaaagtgagtt

SEQ ID NO: 2100 - DNA, 16 bp, synthetic construct
  source 1..16: mol_type = other DNA
ctctacatttagaact

SEQ ID NO: 2101 - DNA, 16 bp, synthetic construct
  source 1..16: mol_type = other DNA
taatgacaaagtaaag

SEQ ID NO: 2102 - DNA, 16 bp, synthetic construct
  source 1..16: mol_type = other DNA
taatctcatgtaattt

SEQ ID NO: 2103 - DNA, 16 bp, synthetic construct
  source 1..16: mol_type = other DNA
aaagcattcagacaaa

SEQ ID NO: 2104 - DNA, 16 bp, synthetic construct
  source 1..16: mol_type = other DNA
tagtaccagctcatac

SEQ ID NO: 2105 - DNA, 16 bp, synthetic construct
  source 1..16: mol_type = other DNA
agcttaagaggaaaac

SEQ ID NO: 2106 - DNA, 16 bp, synthetic construct
  source 1..16: mol_type = other DNA
ataggaatccccttgg

SEQ ID NO: 2107 - DNA, 16 bp, synthetic construct
  source 1..16: mol_type = other DNA
acctatatatgctgtc

SEQ ID NO: 2108 - DNA, 16 bp, synthetic construct
  source 1..16: mol_type = other DNA
atcaataaacttcacc

SEQ ID NO: 2109 - DNA, 16 bp, synthetic construct
  source 1..16: mol_type = other DNA
tctaatcctaatacac

SEQ ID NO: 2110 - DNA, 16 bp, synthetic construct
  source 1..16: mol_type = other DNA
atctacccactattcc

SEQ ID NO: 2111 - DNA, 16 bp, synthetic construct
  source 1..16: mol_type = other DNA
gcaaataacctttcga

SEQ ID NO: 2112 - DNA, 16 bp, synthetic construct
  source 1..16: mol_type = other DNA
catatagtaatttcac

SEQ ID NO: 2113 - DNA, 16 bp, synthetic construct
  source 1..16: mol_type = other DNA
taggtaagacacttgg

SEQ ID NO: 2114 - DNA, 16 bp, synthetic construct
  source 1..16: mol_type = other DNA
gcattataaactcttc

SEQ ID NO: 2115 - DNA, 16 bp, synthetic construct
  source 1..16: mol_type = other DNA
agcacttagacaaagg

SEQ ID NO: 2116 - DNA, 16 bp, synthetic construct
  source 1..16: mol_type = other DNA
tataccacgaggcagg

SEQ ID NO: 2117 - DNA, 16 bp, synthetic construct
  source 1..16: mol_type = other DNA
aagtatacacaaccaa

SEQ ID NO: 2118 - DNA, 16 bp, synthetic construct
  source 1..16: mol_type = other DNA
atcaattatgaatgtc

SEQ ID NO: 2119 - DNA, 16 bp, synthetic construct
  source 1..16: mol_type = other DNA
actgataatagccaac

SEQ ID NO: 2120 - DNA, 16 bp, synthetic construct
  source 1..16: mol_type = other DNA
atggaatctaacaagc

SEQ ID NO: 2121 - DNA, 16 bp, synthetic construct
  source 1..16: mol_type = other DNA
aactatataagcatgc

SEQ ID NO: 2122 - DNA, 16 bp, synthetic construct
  source 1..16: mol_type = other DNA
gattatttgcaactac

SEQ ID NO: 2123 - DNA, 16 bp, synthetic construct
  source 1..16: mol_type = other DNA
taatgtaagaccactc

SEQ ID NO: 2124 - DNA, 16 bp, synthetic construct
  source 1..16: mol_type = other DNA
gcacaaaaacatctgc

SEQ ID NO: 2125 - DNA, 16 bp, synthetic construct
  source 1..16: mol_type = other DNA
ctctatttcagccacc

SEQ ID NO: 2126 - DNA, 16 bp, synthetic construct
  source 1..16: mol_type = other DNA
aggtattagttttagc

SEQ ID NO: 2127 - DNA, 16 bp, synthetic construct
  source 1..16: mol_type = other DNA
gatgtataatgctctg

SEQ ID NO: 2128 - DNA, 16 bp, synthetic construct
  source 1..16: mol_type = other DNA
ccttttagtcaagtat

SEQ ID NO: 2129 - DNA, 16 bp, synthetic construct
  source 1..16: mol_type = other DNA
tgtaattatgttacag

SEQ ID NO: 2130 - DNA, 16 bp, synthetic construct
  source 1..16: mol_type = other DNA
gatagtaaaatctggt

SEQ ID NO: 2131 - DNA, 16 bp, synthetic construct
  source 1..16: mol_type = other DNA
aatgttatatgtggcc

SEQ ID NO: 2132 - DNA, 16 bp, synthetic construct
  source 1..16: mol_type = other DNA
tgaaatactcattgca

SEQ ID NO: 2133 - DNA, 16 bp, synthetic construct
  source 1..16: mol_type = other DNA
ttagataagatcttgc

SEQ ID NO: 2134 - DNA, 16 bp, synthetic construct
  source 1..16: mol_type = other DNA
tatatcacaaacaggg

SEQ ID NO: 2135 - DNA, 16 bp, synthetic construct
  source 1..16: mol_type = other DNA
gcaaatatggtgctaa

SEQ ID NO: 2136 - DNA, 16 bp, synthetic construct
  source 1..16: mol_type = other DNA
gcttatcaatttgact

SEQ ID NO: 2137 - DNA, 16 bp, synthetic construct
  source 1..16: mol_type = other DNA
gcaatatggaatctaa

SEQ ID NO: 2138 - DNA, 16 bp, synthetic construct
  source 1..16: mol_type = other DNA
ttaacactaccattca

SEQ ID NO: 2139 - DNA, 16 bp, synthetic construct
  source 1..16: mol_type = other DNA
tactatgattaaccca

SEQ ID NO: 2140 - DNA, 16 bp, synthetic construct
  source 1..16: mol_type = other DNA
gactatcagattcagt

SEQ ID NO: 2141 - DNA, 16 bp, synthetic construct
  source 1..16: mol_type = other DNA
gaattttgtagtctta

SEQ ID NO: 2142 - DNA, 16 bp, synthetic construct
  source 1..16: mol_type = other DNA
gcaaaatgtagtccaa

SEQ ID NO: 2143 - DNA, 16 bp, synthetic construct
  source 1..16: mol_type = other DNA
ccagtaagttgtacta

SEQ ID NO: 2144 - DNA, 16 bp, synthetic construct
  source 1..16: mol_type = other DNA
ctcataaaaaggttca

SEQ ID NO: 2145 - DNA, 16 bp, synthetic construct
  source 1..16: mol_type = other DNA
tttactactatccatt

SEQ ID NO: 2146 - DNA, 16 bp, synthetic construct
  source 1..16: mol_type = other DNA
tttacctattatttcg

SEQ ID NO: 2147 - DNA, 16 bp, synthetic construct
  source 1..16: mol_type = other DNA
gaatataaacactggg

SEQ ID NO: 2148 - DNA, 16 bp, synthetic construct
  source 1..16: mol_type = other DNA
agctagtatcaaccag

SEQ ID NO: 2149 - DNA, 16 bp, synthetic construct
  source 1..16: mol_type = other DNA
gcattattataggtac

SEQ ID NO: 2150 - DNA, 16 bp, synthetic construct
  source 1..16: mol_type = other DNA
agaaagtaatgcaggt

SEQ ID NO: 2151 - DNA, 16 bp, synthetic construct
  source 1..16: mol_type = other DNA
gatgaatgacactggt

SEQ ID NO: 2152 - DNA, 16 bp, synthetic construct
  source 1..16: mol_type = other DNA
taaacttttgatgaca

SEQ ID NO: 2153 - DNA, 16 bp, synthetic construct
  source 1..16: mol_type = other DNA
attataataggctgga

SEQ ID NO: 2154 - DNA, 16 bp, synthetic construct
  source 1..16: mol_type = other DNA
ggctaaacttcttctg

SEQ ID NO: 2155 - DNA, 16 bp, synthetic construct
  source 1..16: mol_type = other DNA
acaaaatatccccaac

SEQ ID NO: 2156 - DNA, 16 bp, synthetic construct
  source 1..16: mol_type = other DNA
tatactctcaacaact

SEQ ID NO: 2157 - DNA, 16 bp, synthetic construct
  source 1..16: mol_type = other DNA
cctgataatttagatt

SEQ ID NO: 2158 - DNA, 16 bp, synthetic construct
  source 1..16: mol_type = other DNA
ctaaccacatgcatgg

SEQ ID NO: 2159 - DNA, 16 bp, synthetic construct
  source 1..16: mol_type = other DNA
gtggaaagaaatttgc

SEQ ID NO: 2160 - DNA, 16 bp, synthetic construct
  source 1..16: mol_type = other DNA
attaagttttgattgc

SEQ ID NO: 2161 - DNA, 16 bp, synthetic construct
  source 1..16: mol_type = other DNA
cggaaatgattctggc

SEQ ID NO: 2162 - DNA, 16 bp, synthetic construct
  source 1..16: mol_type = other DNA
agtaaagaactgttcc

SEQ ID NO: 2163 - DNA, 16 bp, synthetic construct
  source 1..16: mol_type = other DNA
atagaaccattttgag

SEQ ID NO: 2164 - DNA, 16 bp, synthetic construct
  source 1..16: mol_type = other DNA
aacaactgagcagact

SEQ ID NO: 2165 - DNA, 16 bp, synthetic construct
  source 1..16: mol_type = other DNA
ataagcagtaagctca

SEQ ID NO: 2166 - DNA, 16 bp, synthetic construct
  source 1..16: mol_type = other DNA
tttgtaataagcccaa

SEQ ID NO: 2167 - DNA, 16 bp, synthetic construct
  source 1..16: mol_type = other DNA
tctttaatgcgctgtt

SEQ ID NO: 2168 - DNA, 16 bp, synthetic construct
  source 1..16: mol_type = other DNA
atattagctcatggaa

SEQ ID NO: 2169 - DNA, 16 bp, synthetic construct
  source 1..16: mol_type = other DNA
aattatcgaaccatct

SEQ ID NO: 2170 - DNA, 16 bp, synthetic construct
  source 1..16: mol_type = other DNA
agatacataatttctc

SEQ ID NO: 2171 - DNA, 16 bp, synthetic construct
  source 1..16: mol_type = other DNA
taagcccgacatgttt

SEQ ID NO: 2172 - DNA, 16 bp, synthetic construct
  source 1..16: mol_type = other DNA
agaacctatgaaaaca

SEQ ID NO: 2173 - DNA, 16 bp, synthetic construct
  source 1..16: mol_type = other DNA
caacaagcagctctac

SEQ ID NO: 2174 - DNA, 16 bp, synthetic construct
  source 1..16: mol_type = other DNA
cagccgagaacagtgt

SEQ ID NO: 2175 - DNA, 16 bp, synthetic construct
  source 1..16: mol_type = other DNA
acttaatctcatgtaa

SEQ ID NO: 2176 - DNA, 16 bp, synthetic construct
  source 1..16: mol_type = other DNA
taagagcagcagctta

SEQ ID NO: 2177 - DNA, 16 bp, synthetic construct
  source 1..16: mol_type = other DNA
taatataattagtacc

SEQ ID NO: 2178 - DNA, 16 bp, synthetic construct
  source 1..16: mol_type = other DNA
gtaaatttaaatagga

SEQ ID NO: 2179 - DNA, 16 bp, synthetic construct
  source 1..16: mol_type = other DNA
gctataggtactcttt

SEQ ID NO: 2180 - DNA, 16 bp, synthetic construct
  source 1..16: mol_type = other DNA
ttaacaggatgagctc

SEQ ID NO: 2181 - DNA, 16 bp, synthetic construct
  source 1..16: mol_type = other DNA
caaatttatagcccat

SEQ ID NO: 2182 - DNA, 16 bp, synthetic construct
  source 1..16: mol_type = other DNA
tgtataaaggacctca

SEQ ID NO: 2183 - DNA, 16 bp, synthetic construct
  source 1..16: mol_type = other DNA
gaaacaggcaatagta

SEQ ID NO: 2184 - DNA, 16 bp, synthetic construct
  source 1..16: mol_type = other DNA
tcaaatgcaagatgct

SEQ ID NO: 2185 - DNA, 16 bp, synthetic construct
  source 1..16: mol_type = other DNA
tatcattataggttca

SEQ ID NO: 2186 - DNA, 16 bp, synthetic construct
  source 1..16: mol_type = other DNA
gaaaccattcattcta

SEQ ID NO: 2187 - DNA, 16 bp, synthetic construct
  source 1..16: mol_type = other DNA
caggatacaagacatg

SEQ ID NO: 2188 - DNA, 16 bp, synthetic construct
  source 1..16: mol_type = other DNA
accagtaagttgtact

SEQ ID NO: 2189 - DNA, 16 bp, synthetic construct
  source 1..16: mol_type = other DNA
gactttgaagaggttt

SEQ ID NO: 2190 - DNA, 16 bp, synthetic construct
  source 1..16: mol_type = other DNA
ggaatataaacactgg

SEQ ID NO: 2191 - DNA, 16 bp, synthetic construct
  source 1..16: mol_type = other DNA
ataaccacatatccct

SEQ ID NO: 2192 - DNA, 16 bp, synthetic construct
  source 1..16: mol_type = other DNA
gttatttcaagctcat

SEQ ID NO: 2193 - DNA, 16 bp, synthetic construct
  source 1..16: mol_type = other DNA
gttattataataggct

SEQ ID NO: 2194 - DNA, 16 bp, synthetic construct
  source 1..16: mol_type = other DNA
ctatccagggtattgt

SEQ ID NO: 2195 - DNA, 16 bp, synthetic construct
  source 1..16: mol_type = other DNA
cagaataaattcaggg

SEQ ID NO: 2196 - DNA, 16 bp, synthetic construct
  source 1..16: mol_type = other DNA
cattagttgttaccat

SEQ ID NO: 2197 - DNA, 16 bp, synthetic construct
  source 1..16: mol_type = other DNA
gccaaacagggtgctg

SEQ ID NO: 2198 - DNA, 16 bp, synthetic construct
  source 1..16: mol_type = other DNA
gtaataatctccactc

SEQ ID NO: 2199 - DNA, 16 bp, synthetic construct
  source 1..16: mol_type = other DNA
cattataccacgaggc

SEQ ID NO: 2200 - DNA, 16 bp, synthetic construct
  source 1..16: mol_type = other DNA
gaatttgacacactgc

SEQ ID NO: 2201 - DNA, 16 bp, synthetic construct
  source 1..16: mol_type = other DNA
gtaaatttatggccct

SEQ ID NO: 2202 - DNA, 16 bp, synthetic construct
  source 1..16: mol_type = other DNA
gcaaaatcactccaca

SEQ ID NO: 2203 - DNA, 16 bp, synthetic construct
  source 1..16: mol_type = other DNA
aatctttaactagtca

SEQ ID NO: 2204 - DNA, 16 bp, synthetic construct
  source 1..16: mol_type = other DNA
acatatttgggaagga

SEQ ID NO: 2205 - DNA, 16 bp, synthetic construct
  source 1..16: mol_type = other DNA
gctcataaaaaggttc

SEQ ID NO: 2206 - DNA, 16 bp, synthetic construct
  source 1..16: mol_type = other DNA
agcaaaatgtagtcca

SEQ ID NO: 2207 - DNA, 16 bp, synthetic construct
  source 1..16: mol_type = other DNA
aattatcctgtttgag

SEQ ID NO: 2208 - DNA, 16 bp, synthetic construct
  source 1..16: mol_type = other DNA
gacttaacactaccat

SEQ ID NO: 2209 - DNA, 16 bp, synthetic construct
  source 1..16: mol_type = other DNA
gtaactataatcctta

SEQ ID NO: 2210 - DNA, 16 bp, synthetic construct
  source 1..16: mol_type = other DNA
agttaacagatgctaa

SEQ ID NO: 2211 - DNA, 16 bp, synthetic construct
  source 1..16: mol_type = other DNA
acaaatttcaagctag

SEQ ID NO: 2212 - DNA, 16 bp, synthetic construct
  source 1..16: mol_type = other DNA
cattatctcagaaggc

SEQ ID NO: 2213 - DNA, 16 bp, synthetic construct
  source 1..16: mol_type = other DNA
aatcttaggcaagcag

SEQ ID NO: 2214 - DNA, 16 bp, synthetic construct
  source 1..16: mol_type = other DNA
acacaggatagatgta

SEQ ID NO: 2215 - DNA, 16 bp, synthetic construct
  source 1..16: mol_type = other DNA
agtgataagcaatacc

SEQ ID NO: 2216 - DNA, 16 bp, synthetic construct
  source 1..16: mol_type = other DNA
caatattcatgcatgc

SEQ ID NO: 2217 - DNA, 16 bp, synthetic construct
  source 1..16: mol_type = other DNA
gtgtaaaacaccttca

SEQ ID NO: 2218 - DNA, 16 bp, synthetic construct
  source 1..16: mol_type = other DNA
ccagtaaagtcattct

SEQ ID NO: 2219 - DNA, 16 bp, synthetic construct
  source 1..16: mol_type = other DNA
ttggatagaaacatca

SEQ ID NO: 2220 - DNA, 16 bp, synthetic construct
  source 1..16: mol_type = other DNA
tatatctagatgtctg

SEQ ID NO: 2221 - DNA, 16 bp, synthetic construct
  source 1..16: mol_type = other DNA
gatatacaagccacac

SEQ ID NO: 2222 - DNA, 16 bp, synthetic construct
  source 1..16: mol_type = other DNA
cccaagttatgattct

SEQ ID NO: 2223 - DNA, 16 bp, synthetic construct
  source 1..16: mol_type = other DNA
gatactaagctgtact

SEQ ID NO: 2224 - DNA, 16 bp, synthetic construct
  source 1..16: mol_type = other DNA
gctttaaagcatcaca

SEQ ID NO: 2225 - DNA, 16 bp, synthetic construct
  source 1..16: mol_type = other DNA
ttaagtatacacaacc

SEQ ID NO: 2226 - DNA, 16 bp, synthetic construct
  source 1..16: mol_type = other DNA
tacaatcccaatccat

SEQ ID NO: 2227 - DNA, 16 bp, synthetic construct
  source 1..16: mol_type = other DNA
gccattaaattggtta

SEQ ID NO: 2228 - DNA, 16 bp, synthetic construct
  source 1..16: mol_type = other DNA
aacaggtaaagtgagt

SEQ ID NO: 2229 - DNA, 16 bp, synthetic construct
  source 1..16: mol_type = other DNA
agaacaaagacggcct

SEQ ID NO: 2230 - DNA, 16 bp, synthetic construct
  source 1..16: mol_type = other DNA
gaaaatgctatcacac

SEQ ID NO: 2231 - DNA, 16 bp, synthetic construct
  source 1..16: mol_type = other DNA
gtaattaagttttgat

SEQ ID NO: 2232 - DNA, 16 bp, synthetic construct
  source 1..16: mol_type = other DNA
gatatgagcggtgctc

SEQ ID NO: 2233 - DNA, 16 bp, synthetic construct
  source 1..16: mol_type = other DNA
ctatatatactctcaa

SEQ ID NO: 2234 - DNA, 16 bp, synthetic construct
  source 1..16: mol_type = other DNA
aaacaactgagcagac

SEQ ID NO: 2235 - DNA, 16 bp, synthetic construct
  source 1..16: mol_type = other DNA
tacctatttacactct

SEQ ID NO: 2236 - DNA, 16 bp, synthetic construct
  source 1..16: mol_type = other DNA
actaaccacatgcatg

SEQ ID NO: 2237 - DNA, 16 bp, synthetic construct
  source 1..16: mol_type = other DNA
ctttagttactgaagc

SEQ ID NO: 2238 - DNA, 16 bp, synthetic construct
  source 1..16: mol_type = other DNA
ccggaaatgattctgg

SEQ ID NO: 2239 - DNA, 16 bp, synthetic construct
  source 1..16: mol_type = other DNA
gatcatgtaagatgct

SEQ ID NO: 2240 - DNA, 16 bp, synthetic construct
  source 1..16: mol_type = other DNA
aagttaatagaaccat

SEQ ID NO: 2241 - DNA, 16 bp, synthetic construct
  source 1..16: mol_type = other DNA
aagtaaagaactgttc

SEQ ID NO: 2242 - DNA, 16 bp, synthetic construct
  source 1..16: mol_type = other DNA
accatttaaatgcaat

SEQ ID NO: 2243 - DNA, 16 bp, synthetic construct
  source 1..16: mol_type = other DNA
gaaattccacatgttt

SEQ ID NO: 2244 - DNA, 16 bp, synthetic construct
  source 1..16: mol_type = other DNA
ccagatagtggtcttt

SEQ ID NO: 2245 - DNA, 16 bp, synthetic construct
  source 1..16: mol_type = other DNA
ccttctttaatgcgct

SEQ ID NO: 2246 - DNA, 16 bp, synthetic construct
  source 1..16: mol_type = other DNA
agatattagctcatgg

SEQ ID NO: 2247 - DNA, 16 bp, synthetic construct
  source 1..16: mol_type = other DNA
aaattatcgaaccatc

SEQ ID NO: 2248 - DNA, 16 bp, synthetic construct
  source 1..16: mol_type = other DNA
ggtaactgaagataca

SEQ ID NO: 2249 - DNA, 16 bp, synthetic construct
  source 1..16: mol_type = other DNA
ttcgaaaatgctatca

SEQ ID NO: 2250 - DNA, 16 bp, synthetic construct
  source 1..16: mol_type = other DNA
atacactcagaaccta

SEQ ID NO: 2251 - DNA, 16 bp, synthetic construct
  source 1..16: mol_type = other DNA
gataagcccgacatgt

SEQ ID NO: 2252 - DNA, 16 bp, synthetic construct
  source 1..16: mol_type = other DNA
aatgttccggaaatga

SEQ ID NO: 2253 - DNA, 16 bp, synthetic construct
  source 1..16: mol_type = other DNA
ttaatagtcaacaggt

SEQ ID NO: 2254 - DNA, 16 bp, synthetic construct
  source 1..16: mol_type = other DNA
attgaatgcatacacc

SEQ ID NO: 2255 - DNA, 16 bp, synthetic construct
  source 1..16: mol_type = other DNA
gtcattaatattatac

SEQ ID NO: 2256 - DNA, 16 bp, synthetic construct
  source 1..16: mol_type = other DNA
ataatataattagtac

SEQ ID NO: 2257 - DNA, 16 bp, synthetic construct
  source 1..16: mol_type = other DNA
gattgttagagtaaat

SEQ ID NO: 2258 - DNA, 16 bp, synthetic construct
  source 1..16: mol_type = other DNA
ctccttgaaattccac

SEQ ID NO: 2259 - DNA, 16 bp, synthetic construct
  source 1..16: mol_type = other DNA
atctttaattaggtga

SEQ ID NO: 2260 - DNA, 16 bp, synthetic construct
  source 1..16: mol_type = other DNA
ccaaagatatcacgga

SEQ ID NO: 2261 - DNA, 16 bp, synthetic construct
  source 1..16: mol_type = other DNA
agtcaaaggccattct

SEQ ID NO: 2262 - DNA, 16 bp, synthetic construct
  source 1..16: mol_type = other DNA
catgattaagatgtca

SEQ ID NO: 2263 - DNA, 16 bp, synthetic construct
  source 1..16: mol_type = other DNA
acacaattatgatggg

SEQ ID NO: 2264 - DNA, 16 bp, synthetic construct
  source 1..16: mol_type = other DNA
gtagatatggagcttt

SEQ ID NO: 2265 - DNA, 16 bp, synthetic construct
  source 1..16: mol_type = other DNA
aagtagtcatctgttt

SEQ ID NO: 2266 - DNA, 16 bp, synthetic construct
  source 1..16: mol_type = other DNA
agcaatactttgtggt

SEQ ID NO: 2267 - DNA, 16 bp, synthetic construct
  source 1..16: mol_type = other DNA
ccatttaaaacttgcc

SEQ ID NO: 2268 - DNA, 16 bp, synthetic construct
  source 1..16: mol_type = other DNA
tcagatagctttttca

SEQ ID NO: 2269 - DNA, 16 bp, synthetic construct
  source 1..16: mol_type = other DNA
cctatatctagatgtc

SEQ ID NO: 2270 - DNA, 16 bp, synthetic construct
  source 1..16: mol_type = other DNA
gatttacactactttc

SEQ ID NO: 2271 - DNA, 16 bp, synthetic construct
  source 1..16: mol_type = other DNA
gacataagcagggtgg

SEQ ID NO: 2272 - DNA, 16 bp, synthetic construct
  source 1..16: mol_type = other DNA
agttatttcaagctca

SEQ ID NO: 2273 - DNA, 16 bp, synthetic construct
  source 1..16: mol_type = other DNA
agatactaagctgtac

SEQ ID NO: 2274 - DNA, 16 bp, synthetic construct
  source 1..16: mol_type = other DNA
acattagttgttacca

SEQ ID NO: 2275 - DNA, 16 bp, synthetic construct
  source 1..16: mol_type = other DNA
gggaatataaacactg

SEQ ID NO: 2276 - DNA, 16 bp, synthetic construct
  source 1..16: mol_type = other DNA
gttagtaaacacctta

SEQ ID NO: 2277 - DNA, 16 bp, synthetic construct
  source 1..16: mol_type = other DNA
caaaccacttcacagt

SEQ ID NO: 2278 - DNA, 16 bp, synthetic construct
  source 1..16: mol_type = other DNA
aaatttcagtgctccc

SEQ ID NO: 2279 - DNA, 16 bp, synthetic construct
  source 1..16: mol_type = other DNA
tttactatggttgcat

SEQ ID NO: 2280 - DNA, 16 bp, synthetic construct
  source 1..16: mol_type = other DNA
gactaaaatgtccaca

SEQ ID NO: 2281 - DNA, 16 bp, synthetic construct
  source 1..16: mol_type = other DNA
cttatgaaacaggcaa

SEQ ID NO: 2282 - DNA, 16 bp, synthetic construct
  source 1..16: mol_type = other DNA
agttaagagcagcagc

SEQ ID NO: 2283 - DNA, 16 bp, synthetic construct
  source 1..16: mol_type = other DNA
gtaataagcagccaga

SEQ ID NO: 2284 - DNA, 16 bp, synthetic construct
  source 1..16: mol_type = other DNA
acattataccacgagg

SEQ ID NO: 2285 - DNA, 16 bp, synthetic construct
  source 1..16: mol_type = other DNA
actaatgctttactcc

SEQ ID NO: 2286 - DNA, 16 bp, synthetic construct
  source 1..16: mol_type = other DNA
aggaattgaaggctct

SEQ ID NO: 2287 - DNA, 16 bp, synthetic construct
  source 1..16: mol_type = other DNA
gcaataaggcttctgc

SEQ ID NO: 2288 - DNA, 16 bp, synthetic construct
  source 1..16: mol_type = other DNA
tttacaatcccaatcc

SEQ ID NO: 2289 - DNA, 16 bp, synthetic construct
  source 1..16: mol_type = other DNA
atgttttagaccagag

SEQ ID NO: 2290 - DNA, 16 bp, synthetic construct
  source 1..16: mol_type = other DNA
tctataaatttgtgcc

SEQ ID NO: 2291 - DNA, 16 bp, synthetic construct
  source 1..16: mol_type = other DNA
atcttatatatgcact

SEQ ID NO: 2292 - DNA, 16 bp, synthetic construct
  source 1..16: mol_type = other DNA
tagctataggtactct

SEQ ID NO: 2293 - DNA, 16 bp, synthetic construct
  source 1..16: mol_type = other DNA
aggctgctattaaaga

SEQ ID NO: 2294 - DNA, 16 bp, synthetic construct
  source 1..16: mol_type = other DNA
ctaatcacagactgga

SEQ ID NO: 2295 - DNA, 16 bp, synthetic construct
  source 1..16: mol_type = other DNA
attaccagtaaagtca

SEQ ID NO: 2296 - DNA, 16 bp, synthetic construct
  source 1..16: mol_type = other DNA
atgtataaaggacctc

SEQ ID NO: 2297 - DNA, 16 bp, synthetic construct
  source 1..16: mol_type = other DNA
gtatattttggagtcc

SEQ ID NO: 2298 - DNA, 16 bp, synthetic construct
  source 1..16: mol_type = other DNA
acattacatggctggg

SEQ ID NO: 2299 - DNA, 16 bp, synthetic construct
  source 1..16: mol_type = other DNA
gctctaagagatctgc

SEQ ID NO: 2300 - DNA, 16 bp, synthetic construct
  source 1..16: mol_type = other DNA
aagattaaagtactgt

SEQ ID NO: 2301 - DNA, 16 bp, synthetic construct
  source 1..16: mol_type = other DNA
accttacacagagtga

SEQ ID NO: 2302 - DNA, 16 bp, synthetic construct
  source 1..16: mol_type = other DNA
tttttataactatggc

SEQ ID NO: 2303 - DNA, 16 bp, synthetic construct
  source 1..16: mol_type = other DNA
ccaatattcatgcatg

SEQ ID NO: 2304 - DNA, 16 bp, synthetic construct
  source 1..16: mol_type = other DNA
cttaacttttgactcc

SEQ ID NO: 2305 - DNA, 16 bp, synthetic construct
  source 1..16: mol_type = other DNA
actatatatactctca

SEQ ID NO: 2306 - DNA, 16 bp, synthetic construct
  source 1..16: mol_type = other DNA
caggatacaagagctg

SEQ ID NO: 2307 - DNA, 16 bp, synthetic construct
  source 1..16: mol_type = other DNA
atgtactattgtatta

SEQ ID NO: 2308 - DNA, 16 bp, synthetic construct
  source 1..16: mol_type = other DNA
gaagatctaactcttc

SEQ ID NO: 2309 - DNA, 16 bp, synthetic construct
  source 1..16: mol_type = other DNA
gtcaaaaatgtgtagt

SEQ ID NO: 2310 - DNA, 16 bp, synthetic construct
  source 1..16: mol_type = other DNA
ttctttagttactgaa

SEQ ID NO: 2311 - DNA, 16 bp, synthetic construct
  source 1..16: mol_type = other DNA
caaagttaatagaacc

SEQ ID NO: 2312 - DNA, 16 bp, synthetic construct
  source 1..16: mol_type = other DNA
acaacaataaagaacg

SEQ ID NO: 2313 - DNA, 16 bp, synthetic construct
  source 1..16: mol_type = other DNA
ttacctatttacactc

SEQ ID NO: 2314 - DNA, 16 bp, synthetic construct
  source 1..16: mol_type = other DNA
aaagtaaggactctgc

SEQ ID NO: 2315 - DNA, 16 bp, synthetic construct
  source 1..16: mol_type = other DNA
agttattataataggc

SEQ ID NO: 2316 - DNA, 16 bp, synthetic construct
  source 1..16: mol_type = other DNA
taaaacaactgagcag

SEQ ID NO: 2317 - DNA, 16 bp, synthetic construct
  source 1..16: mol_type = other DNA
tctaaagtttgtacat

SEQ ID NO: 2318 - DNA, 16 bp, synthetic construct
  source 1..16: mol_type = other DNA
acaaaaggagaatgcc

SEQ ID NO: 2319 - DNA, 16 bp, synthetic construct
  source 1..16: mol_type = other DNA
gactaaccacatgcat

SEQ ID NO: 2320 - DNA, 16 bp, synthetic construct
  source 1..16: mol_type = other DNA
caagtaaagaactgtt

SEQ ID NO: 2321 - DNA, 16 bp, synthetic construct
  source 1..16: mol_type = other DNA
catgtataaaggacct

SEQ ID NO: 2322 - DNA, 16 bp, synthetic construct
  source 1..16: mol_type = other DNA
attagtgacagtcaga

SEQ ID NO: 2323 - DNA, 16 bp, synthetic construct
  source 1..16: mol_type = other DNA
accttctttaatgcgc

SEQ ID NO: 2324 - DNA, 16 bp, synthetic construct
  source 1..16: mol_type = other DNA
cagatattagctcatg

SEQ ID NO: 2325 - DNA, 16 bp, synthetic construct
  source 1..16: mol_type = other DNA
aaaattatcgaaccat

SEQ ID NO: 2326 - DNA, 16 bp, synthetic construct
  source 1..16: mol_type = other DNA
aactgggagctgtaca

SEQ ID NO: 2327 - DNA, 16 bp, synthetic construct
  source 1..16: mol_type = other DNA
aggtaactgaagatac

SEQ ID NO: 2328 - DNA, 16 bp, synthetic construct
  source 1..16: mol_type = other DNA
tttcgaaaatgctatc

SEQ ID NO: 2329 - DNA, 16 bp, synthetic construct
  source 1..16: mol_type = other DNA
cactaataggatacac

SEQ ID NO: 2330 - DNA, 16 bp, synthetic construct
  source 1..16: mol_type = other DNA
cctggtaaattttcct

SEQ ID NO: 2331 - DNA, 16 bp, synthetic construct
  source 1..16: mol_type = other DNA
actccttgaaattcca

SEQ ID NO: 2332 - DNA, 16 bp, synthetic construct
  source 1..16: mol_type = other DNA
atagatttaagtcatt

SEQ ID NO: 2333 - DNA, 16 bp, synthetic construct
  source 1..16: mol_type = other DNA
ttaagtgctataatat

SEQ ID NO: 2334 - DNA, 16 bp, synthetic construct
  source 1..16: mol_type = other DNA
ctttatgaaagaggac

SEQ ID NO: 2335 - DNA, 16 bp, synthetic construct
  source 1..16: mol_type = other DNA
cagttaagagcagcag

SEQ ID NO: 2336 - DNA, 16 bp, synthetic construct
  source 1..16: mol_type = other DNA
cttaatactcctgtca

SEQ ID NO: 2337 - DNA, 16 bp, synthetic construct
  source 1..16: mol_type = other DNA
catattttagttggat

SEQ ID NO: 2338 - DNA, 16 bp, synthetic construct
  source 1..16: mol_type = other DNA
agagtattaactccga

SEQ ID NO: 2339 - DNA, 16 bp, synthetic construct
  source 1..16: mol_type = other DNA
gactatatactatgag

SEQ ID NO: 2340 - DNA, 16 bp, synthetic construct
  source 1..16: mol_type = other DNA
tcagatactaagctgt

SEQ ID NO: 2341 - DNA, 16 bp, synthetic construct
  source 1..16: mol_type = other DNA
ttaagtttatacccaa

SEQ ID NO: 2342 - DNA, 16 bp, synthetic construct
  source 1..16: mol_type = other DNA
catatgaacaagagag

SEQ ID NO: 2343 - DNA, 16 bp, synthetic construct
  source 1..16: mol_type = other DNA
gtttactatggttgca

SEQ ID NO: 2344 - DNA, 16 bp, synthetic construct
  source 1..16: mol_type = other DNA
aaaatttcagtgctcc

SEQ ID NO: 2345 - DNA, 16 bp, synthetic construct
  source 1..16: mol_type = other DNA
ggatataaacccaacg

SEQ ID NO: 2346 - DNA, 16 bp, synthetic construct
  source 1..16: mol_type = other DNA
gccaatattcatgcat

SEQ ID NO: 2347 - DNA, 16 bp, synthetic construct
  source 1..16: mol_type = other DNA
ggaactaaagctccaa

SEQ ID NO: 2348 - DNA, 16 bp, synthetic construct
  source 1..16: mol_type = other DNA
acctattagcatgttt

SEQ ID NO: 2349 - DNA, 16 bp, synthetic construct
  source 1..16: mol_type = other DNA
tataccaagtggtagg

SEQ ID NO: 2350 - DNA, 16 bp, synthetic construct
  source 1..16: mol_type = other DNA
gacaatttgaatgttg

SEQ ID NO: 2351 - DNA, 16 bp, synthetic construct
  source 1..16: mol_type = other DNA
aaggaattgaaggctc

SEQ ID NO: 2352 - DNA, 16 bp, synthetic construct
  source 1..16: mol_type = other DNA
agtcaaaaatgtgtag

SEQ ID NO: 2353 - DNA, 16 bp, synthetic construct
  source 1..16: mol_type = other DNA
atctataaatttgtgc

SEQ ID NO: 2354 - DNA, 16 bp, synthetic construct
  source 1..16: mol_type = other DNA
acaaaccacttcacag

SEQ ID NO: 2355 - DNA, 16 bp, synthetic construct
  source 1..16: mol_type = other DNA
tggaatacgcttatcc

SEQ ID NO: 2356 - DNA, 16 bp, synthetic construct
  source 1..16: mol_type = other DNA
ttctatagatgactcc

SEQ ID NO: 2357 - DNA, 16 bp, synthetic construct
  source 1..16: mol_type = other DNA
tccataagcattccaa

SEQ ID NO: 2358 - DNA, 16 bp, synthetic construct
  source 1..16: mol_type = other DNA
ctttattggttgctac

SEQ ID NO: 2359 - DNA, 16 bp, synthetic construct
  source 1..16: mol_type = other DNA
agcaataaggcttctg

SEQ ID NO: 2360 - DNA, 16 bp, synthetic construct
  source 1..16: mol_type = other DNA
agagataagcccgaca

SEQ ID NO: 2361 - DNA, 16 bp, synthetic construct
  source 1..16: mol_type = other DNA
cttagataaggattcc

SEQ ID NO: 2362 - DNA, 16 bp, synthetic construct
  source 1..16: mol_type = other DNA
aacattacatggctgg

SEQ ID NO: 2363 - DNA, 16 bp, synthetic construct
  source 1..16: mol_type = other DNA
tcttatgaaacaggca

SEQ ID NO: 2364 - DNA, 16 bp, synthetic construct
  source 1..16: mol_type = other DNA
gagacttagatgaggg

SEQ ID NO: 2365 - DNA, 16 bp, synthetic construct
  source 1..16: mol_type = other DNA
gtaatttagaagtgct

SEQ ID NO: 2366 - DNA, 16 bp, synthetic construct
  source 1..16: mol_type = other DNA
agtaataagcagccag

SEQ ID NO: 2367 - DNA, 16 bp, synthetic construct
  source 1..16: mol_type = other DNA
cctttacaatcccaat

SEQ ID NO: 2368 - DNA, 16 bp, synthetic construct
  source 1..16: mol_type = other DNA
acaagattaaagtact

SEQ ID NO: 2369 - DNA, 16 bp, synthetic construct
  source 1..16: mol_type = other DNA
gatatacttagatgct

SEQ ID NO: 2370 - DNA, 16 bp, synthetic construct
  source 1..16: mol_type = other DNA
taaagggtattgatca

SEQ ID NO: 2371 - DNA, 16 bp, synthetic construct
  source 1..16: mol_type = other DNA
ataatactggtcttct

SEQ ID NO: 2372 - DNA, 16 bp, synthetic construct
  source 1..16: mol_type = other DNA
agactaaaatgtccac

SEQ ID NO: 2373 - DNA, 16 bp, synthetic construct
  source 1..16: mol_type = other DNA
actactaacatgttta

SEQ ID NO: 2374 - DNA, 16 bp, synthetic construct
  source 1..16: mol_type = other DNA
gacttttaacagttcg

SEQ ID NO: 2375 - DNA, 16 bp, synthetic construct
  source 1..16: mol_type = other DNA
gtagaatttacaggaa

SEQ ID NO: 2376 - DNA, 16 bp, synthetic construct
  source 1..16: mol_type = other DNA
gatattcataaatgca

SEQ ID NO: 2377 - DNA, 16 bp, synthetic construct
  source 1..16: mol_type = other DNA
taagtagtcatctgtt

SEQ ID NO: 2378 - DNA, 16 bp, synthetic construct
  source 1..16: mol_type = other DNA
ccagatttattccagg

SEQ ID NO: 2379 - DNA, 16 bp, synthetic construct
  source 1..16: mol_type = other DNA
accatttaaaacttgc

SEQ ID NO: 2380 - DNA, 16 bp, synthetic construct
  source 1..16: mol_type = other DNA
cataatagatgggcaa

SEQ ID NO: 2381 - DNA, 16 bp, synthetic construct
  source 1..16: mol_type = other DNA
atgtttaagatcatct

SEQ ID NO: 2382 - DNA, 16 bp, synthetic construct
  source 1..16: mol_type = other DNA
tctaatcacagactgg

SEQ ID NO: 2383 - DNA, 16 bp, synthetic construct
  source 1..16: mol_type = other DNA
tcaaaacctgtgttgt

SEQ ID NO: 2384 - DNA, 16 bp, synthetic construct
  source 1..16: mol_type = other DNA
actaattacaacaaca

SEQ ID NO: 2385 - DNA, 16 bp, synthetic construct
  source 1..16: mol_type = other DNA
ctccagatagtggtct

SEQ ID NO: 2386 - DNA, 16 bp, synthetic construct
  source 1..16: mol_type = other DNA
cagttattataatagg

SEQ ID NO: 2387 - DNA, 16 bp, synthetic construct
  source 1..16: mol_type = other DNA
gaaatttgttggattt

SEQ ID NO: 2388 - DNA, 16 bp, synthetic construct
  source 1..16: mol_type = other DNA
agttacctatttacac

SEQ ID NO: 2389 - DNA, 16 bp, synthetic construct
  source 1..16: mol_type = other DNA
cactatatatactctc

SEQ ID NO: 2390 - DNA, 16 bp, synthetic construct
  source 1..16: mol_type = other DNA
cttatacacctaaggg

SEQ ID NO: 2391 - DNA, 16 bp, synthetic construct
  source 1..16: mol_type = other DNA
gcgataaagtaaggac

SEQ ID NO: 2392 - DNA, 16 bp, synthetic construct
  source 1..16: mol_type = other DNA
tacaaaaggagaatgc

SEQ ID NO: 2393 - DNA, 16 bp, synthetic construct
  source 1..16: mol_type = other DNA
gaacaagctcatgact

SEQ ID NO: 2394 - DNA, 16 bp, synthetic construct
  source 1..16: mol_type = other DNA
gaaacagcatcttggt

SEQ ID NO: 2395 - DNA, 16 bp, synthetic construct
  source 1..16: mol_type = other DNA
aaactacagtttgtcc

SEQ ID NO: 2396 - DNA, 16 bp, synthetic construct
  source 1..16: mol_type = other DNA
gcaagtaaagaactgt

SEQ ID NO: 2397 - DNA, 16 bp, synthetic construct
  source 1..16: mol_type = other DNA
catacagacattctat

SEQ ID NO: 2398 - DNA, 16 bp, synthetic construct
  source 1..16: mol_type = other DNA
tattagtgacagtcag

SEQ ID NO: 2399 - DNA, 16 bp, synthetic construct
  source 1..16: mol_type = other DNA
tcagatattagctcat

SEQ ID NO: 2400 - DNA, 16 bp, synthetic construct
  source 1..16: mol_type = other DNA
ttattgacctggtaaa

SEQ ID NO: 2401 - DNA, 16 bp, synthetic construct
  source 1..16: mol_type = other DNA
agttatcactaggtaa

SEQ ID NO: 2402 - DNA, 16 bp, synthetic construct
  source 1..16: mol_type = other DNA
gaaatacctacaagag

SEQ ID NO: 2403 - DNA, 16 bp, synthetic construct
  source 1..16: mol_type = other DNA
aaagcagagataagcc

SEQ ID NO: 2404 - DNA, 16 bp, synthetic construct
  source 1..16: mol_type = other DNA
actagaaacagcatct

SEQ ID NO: 2405 - DNA, 16 bp, synthetic construct
  source 1..16: mol_type = other DNA
atcactaataggatac

SEQ ID NO: 2406 - DNA, 16 bp, synthetic construct
  source 1..16: mol_type = other DNA
ctgttatcttgacatt

SEQ ID NO: 2407 - DNA, 16 bp, synthetic construct
  source 1..16: mol_type = other DNA
cagtatttccactcct

SEQ ID NO: 2408 - DNA, 16 bp, synthetic construct
  source 1..16: mol_type = other DNA
agacaacaaaatagat

SEQ ID NO: 2409 - DNA, 16 bp, synthetic construct
  source 1..16: mol_type = other DNA
cttaagtgctataata

SEQ ID NO: 2410 - DNA, 16 bp, synthetic construct
  source 1..16: mol_type = other DNA
ccaatattaatgtcac

SEQ ID NO: 2411 - DNA, 16 bp, synthetic construct
  source 1..16: mol_type = other DNA
ttaacattacatggct

SEQ ID NO: 2412 - DNA, 16 bp, synthetic construct
  source 1..16: mol_type = other DNA
gcatatgaacaagaga

SEQ ID NO: 2413 - DNA, 16 bp, synthetic construct
  source 1..16: mol_type = other DNA
ctccataagcattcca

SEQ ID NO: 2414 - DNA, 16 bp, synthetic construct
  source 1..16: mol_type = other DNA
gcaataaagctaagtg

SEQ ID NO: 2415 - DNA, 16 bp, synthetic construct
  source 1..16: mol_type = other DNA
tatataccaagtggta

SEQ ID NO: 2416 - DNA, 16 bp, synthetic construct
  source 1..16: mol_type = other DNA
gtatataagttttgat

SEQ ID NO: 2417 - DNA, 16 bp, synthetic construct
  source 1..16: mol_type = other DNA
acagatttaactcttc

SEQ ID NO: 2418 - DNA, 16 bp, synthetic construct
  source 1..16: mol_type = other DNA
actgattaaagctacc

SEQ ID NO: 2419 - DNA, 16 bp, synthetic construct
  source 1..16: mol_type = other DNA
tcatattttagttgga

SEQ ID NO: 2420 - DNA, 16 bp, synthetic construct
  source 1..16: mol_type = other DNA
aatactgacaatcatc

SEQ ID NO: 2421 - DNA, 16 bp, synthetic construct
  source 1..16: mol_type = other DNA
ttaagtagtcatctgt

SEQ ID NO: 2422 - DNA, 16 bp, synthetic construct
  source 1..16: mol_type = other DNA
ccaataacttgtccat

SEQ ID NO: 2423 - DNA, 16 bp, synthetic construct
  source 1..16: mol_type = other DNA
atacctattagcatgt

SEQ ID NO: 2424 - DNA, 16 bp, synthetic construct
  source 1..16: mol_type = other DNA
ttcaagaggctagtgc

SEQ ID NO: 2425 - DNA, 16 bp, synthetic construct
  source 1..16: mol_type = other DNA
gtcttatgaaacaggc

SEQ ID NO: 2426 - DNA, 16 bp, synthetic construct
  source 1..16: mol_type = other DNA
ctaattttggagccat

SEQ ID NO: 2427 - DNA, 16 bp, synthetic construct
  source 1..16: mol_type = other DNA
ttgtatagacttttcc

SEQ ID NO: 2428 - DNA, 16 bp, synthetic construct
  source 1..16: mol_type = other DNA
gtgtatataggaacaa

SEQ ID NO: 2429 - DNA, 16 bp, synthetic construct
  source 1..16: mol_type = other DNA
accttaaggtttttgc

SEQ ID NO: 2430 - DNA, 16 bp, synthetic construct
  source 1..16: mol_type = other DNA
gctaataaccatgtat

SEQ ID NO: 2431 - DNA, 16 bp, synthetic construct
  source 1..16: mol_type = other DNA
aagtttaaatacctcc

SEQ ID NO: 2432 - DNA, 16 bp, synthetic construct
  source 1..16: mol_type = other DNA
agtaatttagaagtgc

SEQ ID NO: 2433 - DNA, 16 bp, synthetic construct
  source 1..16: mol_type = other DNA
gataattctgtcactt

SEQ ID NO: 2434 - DNA, 16 bp, synthetic construct
  source 1..16: mol_type = other DNA
cattatacttccttca

SEQ ID NO: 2435 - DNA, 16 bp, synthetic construct
  source 1..16: mol_type = other DNA
cataatactggtcttc

SEQ ID NO: 2436 - DNA, 16 bp, synthetic construct
  source 1..16: mol_type = other DNA
gcttagcagactgctg

SEQ ID NO: 2437 - DNA, 16 bp, synthetic construct
  source 1..16: mol_type = other DNA
acaatacaaaccactt

SEQ ID NO: 2438 - DNA, 16 bp, synthetic construct
  source 1..16: mol_type = other DNA
aatactccacctggtg

SEQ ID NO: 2439 - DNA, 16 bp, synthetic construct
  source 1..16: mol_type = other DNA
gtaatattgagatcaa

SEQ ID NO: 2440 - DNA, 16 bp, synthetic construct
  source 1..16: mol_type = other DNA
gttcatcggattttca

SEQ ID NO: 2441 - DNA, 16 bp, synthetic construct
  source 1..16: mol_type = other DNA
agcaataactgtgggt

SEQ ID NO: 2442 - DNA, 16 bp, synthetic construct
  source 1..16: mol_type = other DNA
aaccagatgtagtttc

SEQ ID NO: 2443 - DNA, 16 bp, synthetic construct
  source 1..16: mol_type = other DNA
gctattcagatactaa

SEQ ID NO: 2444 - DNA, 16 bp, synthetic construct
  source 1..16: mol_type = other DNA
gctgaactaagtggca

SEQ ID NO: 2445 - DNA, 16 bp, synthetic construct
  source 1..16: mol_type = other DNA
ccattaacaccactgt

SEQ ID NO: 2446 - DNA, 16 bp, synthetic construct
  source 1..16: mol_type = other DNA
aatacagtgtactcac

SEQ ID NO: 2447 - DNA, 16 bp, synthetic construct
  source 1..16: mol_type = other DNA
tttatgagttaaaggg

SEQ ID NO: 2448 - DNA, 16 bp, synthetic construct
  source 1..16: mol_type = other DNA
caatcaatcactttca

SEQ ID NO: 2449 - DNA, 16 bp, synthetic construct
  source 1..16: mol_type = other DNA
atcattaaacctcctc

SEQ ID NO: 2450 - DNA, 16 bp, synthetic construct
  source 1..16: mol_type = other DNA
gcatatacacctgtgc

SEQ ID NO: 2451 - DNA, 16 bp, synthetic construct
  source 1..16: mol_type = other DNA
gatttaagtcgggtca

SEQ ID NO: 2452 - DNA, 16 bp, synthetic construct
  source 1..16: mol_type = other DNA
gttattaaataatccc

SEQ ID NO: 2453 - DNA, 16 bp, synthetic construct
  source 1..16: mol_type = other DNA
aagaagcaggatgctt

SEQ ID NO: 2454 - DNA, 16 bp, synthetic construct
  source 1..16: mol_type = other DNA
tttaattcagtcccca

SEQ ID NO: 2455 - DNA, 16 bp, synthetic construct
  source 1..16: mol_type = other DNA
gatattacaaacaagg

SEQ ID NO: 2456 - DNA, 16 bp, synthetic construct
  source 1..16: mol_type = other DNA
attacctaaaggtcag

SEQ ID NO: 2457 - DNA, 16 bp, synthetic construct
  source 1..16: mol_type = other DNA
gtggataaaagcttta

SEQ ID NO: 2458 - DNA, 16 bp, synthetic construct
  source 1..16: mol_type = other DNA
ccactatatatactct

SEQ ID NO: 2459 - DNA, 16 bp, synthetic construct
  source 1..16: mol_type = other DNA
ttaattagacactgct

SEQ ID NO: 2460 - DNA, 16 bp, synthetic construct
  source 1..16: mol_type = other DNA
gactaattacaacaac

SEQ ID NO: 2461 - DNA, 16 bp, synthetic construct
  source 1..16: mol_type = other DNA
gtacaaaaggagaatg

SEQ ID NO: 2462 - DNA, 16 bp, synthetic construct
  source 1..16: mol_type = other DNA
acatacagacattcta

SEQ ID NO: 2463 - DNA, 16 bp, synthetic construct
  source 1..16: mol_type = other DNA
aactccagatagtggt

SEQ ID NO: 2464 - DNA, 16 bp, synthetic construct
  source 1..16: mol_type = other DNA
ccttatacacctaagg

SEQ ID NO: 2465 - DNA, 16 bp, synthetic construct
  source 1..16: mol_type = other DNA
caaaatttcagtgctc

SEQ ID NO: 2466 - DNA, 16 bp, synthetic construct
  source 1..16: mol_type = other DNA
aaaactacagtttgtc

SEQ ID NO: 2467 - DNA, 16 bp, synthetic construct
  source 1..16: mol_type = other DNA
tcatagtaccttcaac

SEQ ID NO: 2468 - DNA, 16 bp, synthetic construct
  source 1..16: mol_type = other DNA
attgaaatttgttgga

SEQ ID NO: 2469 - DNA, 16 bp, synthetic construct
  source 1..16: mol_type = other DNA
atataccaaacatgct

SEQ ID NO: 2470 - DNA, 16 bp, synthetic construct
  source 1..16: mol_type = other DNA
tgcaagtaaagaactg

SEQ ID NO: 2471 - DNA, 16 bp, synthetic construct
  source 1..16: mol_type = other DNA
ttcaaactgggagctg

SEQ ID NO: 2472 - DNA, 16 bp, synthetic construct
  source 1..16: mol_type = other DNA
caagaactgaccacct

SEQ ID NO: 2473 - DNA, 16 bp, synthetic construct
  source 1..16: mol_type = other DNA
tccaatattgtggcca

SEQ ID NO: 2474 - DNA, 16 bp, synthetic construct
  source 1..16: mol_type = other DNA
gtaaagaaatgttcca

SEQ ID NO: 2475 - DNA, 16 bp, synthetic construct
  source 1..16: mol_type = other DNA
actatcatatgaaagc

SEQ ID NO: 2476 - DNA, 16 bp, synthetic construct
  source 1..16: mol_type = other DNA
ctatcatatgaaagcc

SEQ ID NO: 2477 - DNA, 16 bp, synthetic construct
  source 1..16: mol_type = other DNA
tatcatatgaaagcca

SEQ ID NO: 2478 - DNA, 16 bp, synthetic construct
  source 1..16: mol_type = other DNA
atgcagaattgataac

SEQ ID NO: 2479 - DNA, 16 bp, synthetic construct
  source 1..16: mol_type = other DNA
gcagtaatattaaagc

SEQ ID NO: 2480 - DNA, 16 bp, synthetic construct
  source 1..16: mol_type = other DNA
cagtaatattaaagcc

SEQ ID NO: 2481 - DNA, 16 bp, synthetic construct
  source 1..16: mol_type = other DNA
ttttaagagtccacta

SEQ ID NO: 2482 - DNA, 16 bp, synthetic construct
  source 1..16: mol_type = other DNA
tttaagagtccactag

SEQ ID NO: 2483 - DNA, 16 bp, synthetic construct
  source 1..16: mol_type = other DNA
taaagaagtgttgtcc

SEQ ID NO: 2484 - DNA, 16 bp, synthetic construct
  source 1..16: mol_type = other DNA
aagttattatatggct

SEQ ID NO: 2485 - DNA, 16 bp, synthetic construct
  source 1..16: mol_type = other DNA
gttattatatggctgt

SEQ ID NO: 2486 - DNA, 16 bp, synthetic construct
  source 1..16: mol_type = other DNA
ggttttaagttatctc

SEQ ID NO: 2487 - DNA, 16 bp, synthetic construct
  source 1..16: mol_type = other DNA
aatacctgagtgactg

SEQ ID NO: 2488 - DNA, 16 bp, synthetic construct
  source 1..16: mol_type = other DNA
atacctgagtgactga

SEQ ID NO: 2489 - DNA, 16 bp, synthetic construct
  source 1..16: mol_type = other DNA
caatttagctctatta

SEQ ID NO: 2490 - DNA, 16 bp, synthetic construct
  source 1..16: mol_type = other DNA
gaactgaccaccttct

SEQ ID NO: 2491 - DNA, 16 bp, synthetic construct
  source 1..16: mol_type = other DNA
gaccaccttctttaat

SEQ ID NO: 2492 - DNA, 16 bp, synthetic construct
  source 1..16: mol_type = other DNA
ataggtaatttatgag

SEQ ID NO: 2493 - DNA, 16 bp, synthetic construct
  source 1..16: mol_type = other DNA
tgagataatgtgaagc

SEQ ID NO: 2494 - DNA, 16 bp, synthetic construct
  source 1..16: mol_type = other DNA
gagataatgtgaagct

SEQ ID NO: 2495 - DNA, 16 bp, synthetic construct
  source 1..16: mol_type = other DNA
ataatgtgaagcttag

SEQ ID NO: 2496 - DNA, 16 bp, synthetic construct
  source 1..16: mol_type = other DNA
aatctataggatgctg

SEQ ID NO: 2497 - DNA, 16 bp, synthetic construct
  source 1..16: mol_type = other DNA
acatttagaggcattg

SEQ ID NO: 2498 - DNA, 16 bp, synthetic construct
  source 1..16: mol_type = other DNA
atttagaggcattgca

SEQ ID NO: 2499 - DNA, 16 bp, synthetic construct
  source 1..16: mol_type = other DNA
tgtagtataaagaagt

SEQ ID NO: 2500 - DNA, 16 bp, synthetic construct
  source 1..16: mol_type = other DNA
tctcattaaatcaagg

SEQ ID NO: 2501 - DNA, 16 bp, synthetic construct
  source 1..16: mol_type = other DNA
tcattaaatcaaggca

SEQ ID NO: 2502 - DNA, 16 bp, synthetic construct
  source 1..16: mol_type = other DNA
ttattatagggttgaa

SEQ ID NO: 2503 - DNA, 16 bp, synthetic construct
  source 1..16: mol_type = other DNA
tattatagggttgaaa

SEQ ID NO: 2504 - DNA, 16 bp, synthetic construct
  source 1..16: mol_type = other DNA
aggtaaggcaatggac

SEQ ID NO: 2505 - DNA, 16 bp, synthetic construct
  source 1..16: mol_type = other DNA
ggtaaggcaatggact

SEQ ID NO: 2506 - DNA, 16 bp, synthetic construct
  source 1..16: mol_type = other DNA
tgaacaatgctgattc

SEQ ID NO: 2507 - DNA, 16 bp, synthetic construct
  source 1..16: mol_type = other DNA
acaatgctgattcagg

SEQ ID NO: 2508 - DNA, 16 bp, synthetic construct
  source 1..16: mol_type = other DNA
ggtgatattgtataag

SEQ ID NO: 2509 - DNA, 16 bp, synthetic construct
  source 1..16: mol_type = other DNA
tgatattgtataaggt

SEQ ID NO: 2510 - DNA, 16 bp, synthetic construct
  source 1..16: mol_type = other DNA
tattgtataaggttag

SEQ ID NO: 2511 - DNA, 16 bp, synthetic construct
  source 1..16: mol_type = other DNA
attgtataaggttagg

SEQ ID NO: 2512 - DNA, 16 bp, synthetic construct
  source 1..16: mol_type = other DNA
cgtcaagtaatgagtt

SEQ ID NO: 2513 - DNA, 16 bp, synthetic construct
  source 1..16: mol_type = other DNA
gatcttttgaatctgt

SEQ ID NO: 2514 - DNA, 16 bp, synthetic construct
  source 1..16: mol_type = other DNA
tcttttgaatctgtcc

SEQ ID NO: 2515 - DNA, 16 bp, synthetic construct
  source 1..16: mol_type = other DNA
tggtaccattactgag

SEQ ID NO: 2516 - DNA, 16 bp, synthetic construct
  source 1..16: mol_type = other DNA
ctccagttaacagcgc

SEQ ID NO: 2517 - DNA, 16 bp, synthetic construct
  source 1..16: mol_type = other DNA
agttaacagcgcggtg

SEQ ID NO: 2518 - DNA, 16 bp, synthetic construct
  source 1..16: mol_type = other DNA
gttaacagcgcggtga

SEQ ID NO: 2519 - DNA, 16 bp, synthetic construct
  source 1..16: mol_type = other DNA
ttaacagcgcggtgag

SEQ ID NO: 2520 - DNA, 16 bp, synthetic construct
  source 1..16: mol_type = other DNA
gaatagcccatcacga

SEQ ID NO: 2521 - DNA, 16 bp, synthetic construct
  source 1..16: mol_type = other DNA
aatagcccatcacgat

SEQ ID NO: 2522 - DNA, 16 bp, synthetic construct
  source 1..16: mol_type = other DNA
acacaaaccagctgat

SEQ ID NO: 2523 - DNA, 16 bp, synthetic construct
  source 1..16: mol_type = other DNA
cacaaaccagctgatg

SEQ ID NO: 2524 - DNA, 16 bp, synthetic construct
  source 1..16: mol_type = other DNA
acaaaccagctgatga

SEQ ID NO: 2525 - DNA, 16 bp, synthetic construct
  source 1..16: mol_type = other DNA
aaccagctgatgagat

SEQ ID NO: 2526 - DNA, 16 bp, synthetic construct
  source 1..16: mol_type = other DNA
gtttgaagaatgcatg

SEQ ID NO: 2527 - DNA, 16 bp, synthetic construct
  source 1..16: mol_type = other DNA
ctaaatttagtatcct

SEQ ID NO: 2528 - DNA, 16 bp, synthetic construct
  source 1..16: mol_type = other DNA
aattaggattaaggag

SEQ ID NO: 2529 - DNA, 16 bp, synthetic construct
  source 1..16: mol_type = other DNA
attaggattaaggagt

SEQ ID NO: 2530 - DNA, 16 bp, synthetic construct
  source 1..16: mol_type = other DNA
ttaggattaaggagtt

SEQ ID NO: 2531 - DNA, 16 bp, synthetic construct
  source 1..16: mol_type = other DNA
aggattaaggagttct

SEQ ID NO: 2532 - DNA, 16 bp, synthetic construct
  source 1..16: mol_type = other DNA
ggattaaggagttctg

SEQ ID NO: 2533 - DNA, 16 bp, synthetic construct
  source 1..16: mol_type = other DNA
gattaaggagttctgt

SEQ ID NO: 2534 - DNA, 16 bp, synthetic construct
  source 1..16: mol_type = other DNA
aaactgggagctgtac

SEQ ID NO: 2535 - DNA, 16 bp, synthetic construct
  source 1..16: mol_type = other DNA
agtattaaccaccatt

SEQ ID NO: 2536 - DNA, 16 bp, synthetic construct
  source 1..16: mol_type = other DNA
agatttaataggtctt

SEQ ID NO: 2537 - DNA, 16 bp, synthetic construct
  source 1..16: mol_type = other DNA
ctatagtatgatagca

SEQ ID NO: 2538 - DNA, 16 bp, synthetic construct
  source 1..16: mol_type = other DNA
tagtatgatagcacaa

SEQ ID NO: 2539 - DNA, 16 bp, synthetic construct
  source 1..16: mol_type = other DNA
agtatgatagcacaaa

SEQ ID NO: 2540 - DNA, 16 bp, synthetic construct
  source 1..16: mol_type = other DNA
gtatgatagcacaaac

SEQ ID NO: 2541 - DNA, 16 bp, synthetic construct
  source 1..16: mol_type = other DNA
aattgttatactgatg

SEQ ID NO: 2542 - DNA, 16 bp, synthetic construct
  source 1..16: mol_type = other DNA
attgttatactgatgg

SEQ ID NO: 2543 - DNA, 16 bp, synthetic construct
  source 1..16: mol_type = other DNA
ttgttatactgatggg

SEQ ID NO: 2544 - DNA, 16 bp, synthetic construct
  source 1..16: mol_type = other DNA
gttatactgatgggct

SEQ ID NO: 2545 - DNA, 16 bp, synthetic construct
  source 1..16: mol_type = other DNA
ttatactgatgggcta

SEQ ID NO: 2546 - DNA, 16 bp, synthetic construct
  source 1..16: mol_type = other DNA
tatactgatgggctag

SEQ ID NO: 2547 - DNA, 16 bp, synthetic construct
  source 1..16: mol_type = other DNA
gctgtaaactttgttc

SEQ ID NO: 2548 - DNA, 16 bp, synthetic construct
  source 1..16: mol_type = other DNA
tttcaaactgggagct

SEQ ID NO: 2549 - DNA, 16 bp, synthetic construct
  source 1..16: mol_type = other DNA
cccaacctcttgcacc

SEQ ID NO: 2550 - DNA, 16 bp, synthetic construct
  source 1..16: mol_type = other DNA
taagagtccactagcc

SEQ ID NO: 2551 - DNA, 16 bp, synthetic construct
  source 1..16: mol_type = other DNA
ccactagaatagccca

SEQ ID NO: 2552 - DNA, 16 bp, synthetic construct
  source 1..16: mol_type = other DNA
gattatgaggaaacct

SEQ ID NO: 2553 - DNA, 16 bp, synthetic construct
  source 1..16: mol_type = other DNA
atgaatggtatgatgg

SEQ ID NO: 2554 - DNA, 16 bp, synthetic construct
  source 1..16: mol_type = other DNA
ttgaagaatgcatgtc

SEQ ID NO: 2555 - DNA, 16 bp, synthetic construct
  source 1..16: mol_type = other DNA
ttaattaggattaagg

SEQ ID NO: 2556 - DNA, 16 bp, synthetic construct
  source 1..16: mol_type = other DNA
ttaaggagttctgtgt

SEQ ID NO: 2557 - DNA, 16 bp, synthetic construct
  source 1..16: mol_type = other DNA
ttagaggcattgcagg

SEQ ID NO: 2558 - DNA, 16 bp, synthetic construct
  source 1..16: mol_type = other DNA
tatagggttgaaaata

SEQ ID NO: 2559 - DNA, 16 bp, synthetic construct
  source 1..16: mol_type = other DNA
tgtataaggttaggtg

SEQ ID NO: 2560 - DNA, 16 bp, synthetic construct
  source 1..16: mol_type = other DNA
gccactagaatagccc

SEQ ID NO: 2561 - DNA, 16 bp, synthetic construct
  source 1..16: mol_type = other DNA
tattaaccaccattcc

SEQ ID NO: 2562 - DNA, 16 bp, synthetic construct
  source 1..16: mol_type = other DNA
tactgatgggctagcc

SEQ ID NO: 2563 - DNA, 16 bp, synthetic construct
  source 1..16: mol_type = other DNA
ttccggaaatgattct

SEQ ID NO: 2564 - DNA, 16 bp, synthetic construct
  source 1..16: mol_type = other DNA
atggtttcaaactggg

SEQ ID NO: 2565 - DNA, 16 bp, synthetic construct
  source 1..16: mol_type = other DNA
  modified_base 5: mod_base = OTHER; note = uracil
accttctttaatgcgc

SEQ ID NO: 2566 - DNA, 16 bp, synthetic construct
  source 1..16: mol_type = other DNA
  modified_base 5: mod_base = OTHER; note = uracil
tgtattattgacctgg

SEQ ID NO: 2567 - DNA, 16 bp, synthetic construct
  source 1..16: mol_type = other DNA
  modified_base 5: mod_base = OTHER; note = uracil
ggtattattagtatgt

SEQ ID NO: 2568 - DNA, 16 bp, synthetic construct
  source 1..16: mol_type = other DNA
  modified_base 5: mod_base = OTHER; note = uracil
tctgtgttttacgact

SEQ ID NO: 2569 - DNA, 16 bp, synthetic construct
  source 1..16: mol_type = other DNA
  modified_base 5: mod_base = OTHER; note = uracil
gagctgcttcgatcac

SEQ ID NO: 2570 - DNA, 16 bp, synthetic construct
  source 1..16: mol_type = other DNA
  modified_base 5: mod_base = OTHER; note = uracil
atcttctatttaatgg

SEQ ID NO: 2571 - DNA, 16 bp, synthetic construct
  source 1..16: mol_type = other DNA
  modified_base 5: mod_base = OTHER; note = uracil
catcttttgctggcat

SEQ ID NO: 2572 - DNA, 16 bp, synthetic construct
  source 1..16: mol_type = other DNA
ttgtcatacactaacc

SEQ ID NO: 2573 - DNA, 16 bp, synthetic construct
  source 1..16: mol_type = other DNA
agtgcttggctgaagg

SEQ ID NO: 2574 - DNA, 16 bp, synthetic construct
  source 1..16: mol_type = other DNA
tcggcagagggatgtt

SEQ ID NO: 2575 - DNA, 16 bp, synthetic construct
  source 1..16: mol_type = other DNA
tacaccaccaccgaca

SEQ ID NO: 2576 - DNA, 16 bp, synthetic construct
  source 1..16: mol_type = other DNA
gagagaaatccgatca

SEQ ID NO: 2577 - DNA, 16 bp, synthetic construct
  source 1..16: mol_type = other DNA
aagagcaattcagccg

SEQ ID NO: 2578 - DNA, 16 bp, synthetic construct
  source 1..16: mol_type = other DNA
ctaggcaatagcaaag

SEQ ID NO: 2579 - DNA, 16 bp, synthetic construct
  source 1..16: mol_type = other DNA
  modified_base 5: mod_base = OTHER; note = uracil
cacttggtccagttca

SEQ ID NO: 2580 - DNA, 16 bp, synthetic construct
  source 1..16: mol_type = other DNA
tctggaggctgactgc

SEQ ID NO: 2581 - DNA, 16 bp, synthetic construct
  source 1..16: mol_type = other DNA
atagcactaaagtttt

SEQ ID NO: 2582 - DNA, 16 bp, synthetic construct
  source 1..16: mol_type = other DNA
tttagctctattaaat

SEQ ID NO: 2583 - DNA, 16 bp, synthetic construct
  source 1..16: mol_type = other DNA
acacacagcctggtcc

SEQ ID NO: 2584 - DNA, 16 bp, synthetic construct
  source 1..16: mol_type = other DNA
  modified_base 5: mod_base = OTHER; note = uracil
tctgttaaattcacac

SEQ ID NO: 2585 - DNA, 16 bp, synthetic construct
  source 1..16: mol_type = other DNA
ccaggcaacacacaca

SEQ ID NO: 2586 - DNA, 16 bp, synthetic construct
  source 1..16: mol_type = other DNA
gtcacggactgctgac

SEQ ID NO: 2587 - DNA, 16 bp, synthetic construct
  source 1..16: mol_type = other DNA
cctggacttagtgctg

SEQ ID NO: 2588 - DNA, 16 bp, synthetic construct
  source 1..16: mol_type = other DNA
  modified_base 5: mod_base = OTHER; note = uracil
aagttgcaggatgcac

SEQ ID NO: 2589 - DNA, 16 bp, synthetic construct
  source 1..16: mol_type = other DNA
gggtcttgctcatgaa

SEQ ID NO: 2590 - DNA, 16 bp, synthetic construct
  source 1..16: mol_type = other DNA
atttgtccccactgtc

SEQ ID NO: 2591 - DNA, 16 bp, synthetic construct
  source 1..16: mol_type = other DNA
gccagtggcagagctg

SEQ ID NO: 2592 - DNA, 16 bp, synthetic construct
  source 1..16: mol_type = other DNA
tcctgcctctctggga

SEQ ID NO: 2593 - DNA, 16 bp, synthetic construct
  source 1..16: mol_type = other DNA
gccagaggcagtgtac

SEQ ID NO: 2594 - DNA, 16 bp, synthetic construct
  source 1..16: mol_type = other DNA
agtcctgggccttaag

SEQ ID NO: 2595 - DNA, 16 bp, synthetic construct
  source 1..16: mol_type = other DNA
aatggtatgatggttc

SEQ ID NO: 2596 - DNA, 16 bp, synthetic construct
  source 1..16: mol_type = other DNA
tgtcacagttaagagc

SEQ ID NO: 2597 - DNA, 16 bp, synthetic construct
  source 1..16: mol_type = other DNA
ccaagcatgcatccac

SEQ ID NO: 2598 - DNA, 16 bp, synthetic construct
  source 1..16: mol_type = other DNA
  modified_base 5: mod_base = OTHER; note = uracil
tgcattttctggcttt

SEQ ID NO: 2599 - DNA, 16 bp, synthetic construct
  source 1..16: mol_type = other DNA
agtcatccctgccagg

SEQ ID NO: 2600 - DNA, 16 bp, synthetic construct
  source 1..16: mol_type = other DNA
tccagttaacagcgcg

SEQ ID NO: 2601 - DNA, 16 bp, synthetic construct
  source 1..16: mol_type = other DNA
cctccgttgttacttc

SEQ ID NO: 2602 - DNA, 16 bp, synthetic construct
  source 1..16: mol_type = other DNA
tggcagtgtccagctc

SEQ ID NO: 2603 - DNA, 16 bp, synthetic construct
  source 1..16: mol_type = other DNA
  modified_base 5: mod_base = OTHER; note = uracil
ccagtacctttgtagc

SEQ ID NO: 2604 - DNA, 16 bp, synthetic construct
  source 1..16: mol_type = other DNA
  modified_base 5: mod_base = OTHER; note = uracil
agagtcaatgggctgt

SEQ ID NO: 2605 - DNA, 16 bp, synthetic construct
  source 1..16: mol_type = other DNA
ctgtcaggagaggctg

SEQ ID NO: 2606 - DNA, 16 bp, synthetic construct
  source 1..16: mol_type = other DNA
ttgcagtgatgtctca

SEQ ID NO: 2607 - DNA, 16 bp, synthetic construct
  source 1..16: mol_type = other DNA
tttgacccggcctggg

SEQ ID NO: 2608 - DNA, 16 bp, synthetic construct
  source 1..16: mol_type = other DNA
catccccctgggtgct

SEQ ID NO: 2609 - DNA, 16 bp, synthetic construct
  source 1..16: mol_type = other DNA
  modified_base 5: mod_base = OTHER; note = uracil
gacctctgctctttca

SEQ ID NO: 2610 - DNA, 16 bp, synthetic construct
  source 1..16: mol_type = other DNA
tgctgagctcccgagg

SEQ ID NO: 2611 - DNA, 16 bp, synthetic construct
  source 1..16: mol_type = other DNA
cagcccctttcctccc

SEQ ID NO: 2612 - DNA, 16 bp, synthetic construct
  source 1..16: mol_type = other DNA
  modified_base 5: mod_base = OTHER; note = uracil
tgggtctctctcttgt

SEQ ID NO: 2613 - DNA, 16 bp, synthetic construct
  source 1..16: mol_type = other DNA
tcctgtccacagtatt

SEQ ID NO: 2614 - DNA, 16 bp, synthetic construct
  source 1..16: mol_type = other DNA
  modified_base 5: mod_base = OTHER; note = uracil
gatgtcctccccctga

SEQ ID NO: 2615 - DNA, 16 bp, synthetic construct
  source 1..16: mol_type = other DNA
  modified_base 5: mod_base = OTHER; note = uracil
aggctctgagtataat

SEQ ID NO: 2616 - DNA, 16 bp, synthetic construct
  source 1..16: mol_type = other DNA
ggtggagtcctccgta

SEQ ID NO: 2617 - DNA, 16 bp, synthetic construct
  source 1..16: mol_type = other DNA
  modified_base 5: mod_base = OTHER; note = uracil
tgtatcagattacctt

SEQ ID NO: 2618 - DNA, 16 bp, synthetic construct
  source 1..16: mol_type = other DNA
tctgggttacaataaa

SEQ ID NO: 2619 - DNA, 16 bp, synthetic construct
  source 1..16: mol_type = other DNA
gtttctcccacaagag

SEQ ID NO: 2620 - DNA, 16 bp, synthetic construct
  source 1..16: mol_type = other DNA
ctatcacactctttca

SEQ ID NO: 2621 - DNA, 16 bp, synthetic construct
  source 1..16: mol_type = other DNA
catgggaaccatgtag

SEQ ID NO: 2622 - DNA, 16 bp, synthetic construct
  source 1..16: mol_type = other DNA
ttgcacaggtaaggca

SEQ ID NO: 2623 - DNA, 16 bp, synthetic construct
  source 1..16: mol_type = other DNA
  modified_base 5: mod_base = OTHER; note = uracil
tcgcttttcactgttg

SEQ ID NO: 2624 - DNA, 16 bp, synthetic construct
  source 1..16: mol_type = other DNA
ggatacactcagaacc

SEQ ID NO: 2625 - DNA, 16 bp, synthetic construct
  source 1..16: mol_type = other DNA
ctaggtcagtggacaa

SEQ ID NO: 2626 - DNA, 16 bp, synthetic construct
  source 1..16: mol_type = other DNA
tgtacttcagactctg

SEQ ID NO: 2627 - DNA, 16 bp, synthetic construct
  source 1..16: mol_type = other DNA
ttttcttcaagggaga

SEQ ID NO: 2628 - DNA, 16 bp, synthetic construct
  source 1..16: mol_type = other DNA
ccctgacttcccgttc

SEQ ID NO: 2629 - DNA, 16 bp, synthetic construct
  source 1..16: mol_type = other DNA
  modified_base 5: mod_base = OTHER; note = uracil
tctgtctctgtgcagg

SEQ ID NO: 2630 - DNA, 16 bp, synthetic construct
  source 1..16: mol_type = other DNA
  modified_base 5: mod_base = OTHER; note = uracil
tatttcctgccctccc

SEQ ID NO: 2631 - DNA, 16 bp, synthetic construct
  source 1..16: mol_type = other DNA
acctgtgttgttaata

SEQ ID NO: 2632 - DNA, 16 bp, synthetic construct
  source 1..16: mol_type = other DNA
tcatgttttttcatcc

SEQ ID NO: 2633 - DNA, 16 bp, synthetic construct
  source 1..16: mol_type = other DNA
cacactcttgttattt

SEQ ID NO: 2634 - DNA, 16 bp, synthetic construct
  source 1..16: mol_type = other DNA
  modified_base 5: mod_base = OTHER; note = uracil
tgattttcttaatggt

SEQ ID NO: 2635 - DNA, 16 bp, synthetic construct
  source 1..16: mol_type = other DNA
ttggctgtctgctgct

SEQ ID NO: 2636 - DNA, 16 bp, synthetic construct
  source 1..16: mol_type = other DNA
  modified_base 5: mod_base = OTHER; note = uracil
tgcttcgatcacatcc

SEQ ID NO: 2637 - DNA, 16 bp, synthetic construct
  source 1..16: mol_type = other DNA
  modified_base 5: mod_base = OTHER; note = uracil
tcgatcacatccccct

SEQ ID NO: 2638 - DNA, 16 bp, synthetic construct
  source 1..16: mol_type = other DNA
  modified_base 5: mod_base = OTHER; note = uracil
ggtattattgataggc

SEQ ID NO: 2639 - DNA, 16 bp, synthetic construct
  source 1..16: mol_type = other DNA
  modified_base 5: mod_base = OTHER; note = uracil
tgtgtattattgacct

SEQ ID NO: 2640 - DNA, 16 bp, synthetic construct
  source 1..16: mol_type = other DNA
aaggcaaatctctttc

SEQ ID NO: 2641 - DNA, 16 bp, synthetic construct
  source 1..16: mol_type = other DNA
  modified_base 5: mod_base = OTHER; note = uracil
ttgctttaagttgtca

SEQ ID NO: 2642 - DNA, 16 bp, synthetic construct
  source 1..16: mol_type = other DNA
ttgggccctcagtgct

SEQ ID NO: 2643 - DNA, 16 bp, synthetic construct
  source 1..16: mol_type = other DNA
cttccttgcctcggca

SEQ ID NO: 2644 - DNA, 16 bp, synthetic construct
  source 1..16: mol_type = other DNA
tttccttcaaattgaa

SEQ ID NO: 2645 - DNA, 16 bp, synthetic construct
  source 1..16: mol_type = other DNA
  modified_base 5: mod_base = OTHER; note = uracil
cacatggcatgagaga

SEQ ID NO: 2646 - DNA, 16 bp, synthetic construct
  source 1..16: mol_type = other DNA
ctttctttaaaagagc

SEQ ID NO: 2647 - DNA, 16 bp, synthetic construct
  source 1..16: mol_type = other DNA
accgccactgaaataa

SEQ ID NO: 2648 - DNA, 16 bp, synthetic construct
  source 1..16: mol_type = other DNA
  modified_base 5: mod_base = OTHER; note = uracil
cttgttctagatctac

SEQ ID NO: 2649 - DNA, 16 bp, synthetic construct
  source 1..16: mol_type = other DNA
gagcacgggctctgga

SEQ ID NO: 2650 - DNA, 16 bp, synthetic construct
  source 1..16: mol_type = other DNA
atttggtttaatagca

SEQ ID NO: 2651 - DNA, 16 bp, synthetic construct
  source 1..16: mol_type = other DNA
agcacacacagcctgg

SEQ ID NO: 2652 - DNA, 16 bp, synthetic construct
  source 1..16: mol_type = other DNA
agctctgttaaattca

SEQ ID NO: 2653 - DNA, 16 bp, synthetic construct
  source 1..16: mol_type = other DNA
  modified_base 5: mod_base = OTHER; note = uracil
tgactgaaatagacaa

SEQ ID NO: 2654 - DNA, 16 bp, synthetic construct
  source 1..16: mol_type = other DNA
  modified_base 5: mod_base = OTHER; note = uracil
cctgttggttgtccaa

SEQ ID NO: 2655 - DNA, 16 bp, synthetic construct
  source 1..16: mol_type = other DNA
ggcagagagggtcacg

SEQ ID NO: 2656 - DNA, 16 bp, synthetic construct
  source 1..16: mol_type = other DNA
  modified_base 5: mod_base = OTHER; note = uracil
cttgtggtaacctgga

SEQ ID NO: 2657 - DNA, 16 bp, synthetic construct
  source 1..16: mol_type = other DNA
gcctggatagaagttg

SEQ ID NO: 2658 - DNA, 16 bp, synthetic construct
  source 1..16: mol_type = other DNA
  modified_base 5: mod_base = OTHER; note = uracil
cacttgccacatctct

SEQ ID NO: 2659 - DNA, 16 bp, synthetic construct
  source 1..16: mol_type = other DNA
atgagctttcatttgt

SEQ ID NO: 2660 - DNA, 16 bp, synthetic construct
  source 1..16: mol_type = other DNA
ttccaggttggtctaa

SEQ ID NO: 2661 - DNA, 16 bp, synthetic construct
  source 1..16: mol_type = other DNA
  modified_base 5: mod_base = OTHER; note = uracil
ggtttcccataacacg

SEQ ID NO: 2662 - DNA, 16 bp, synthetic construct
  source 1..16: mol_type = other DNA
  modified_base 5: mod_base = OTHER; note = uracil
gcagtctgactttaga

SEQ ID NO: 2663 - DNA, 16 bp, synthetic construct
  source 1..16: mol_type = other DNA
atgtcacagttaagag

SEQ ID NO: 2664 - DNA, 16 bp, synthetic construct
  source 1..16: mol_type = other DNA
tgtactgtaagtcctg

SEQ ID NO: 2665 - DNA, 16 bp, synthetic construct
  source 1..16: mol_type = other DNA
tcacaccaaagtgata

SEQ ID NO: 2666 - DNA, 16 bp, synthetic construct
  source 1..16: mol_type = other DNA
  modified_base 5: mod_base = OTHER; note = uracil
tctctcactgatatca

SEQ ID NO: 2667 - DNA, 16 bp, synthetic construct
  source 1..16: mol_type = other DNA
  modified_base 5: mod_base = OTHER; note = uracil
tcagttgggaagaaaa

SEQ ID NO: 2668 - DNA, 16 bp, synthetic construct
  source 1..16: mol_type = other DNA
  modified_base 5: mod_base = OTHER; note = uracil
ggcctttacatttata

SEQ ID NO: 2669 - DNA, 16 bp, synthetic construct
  source 1..16: mol_type = other DNA
ccttggactgataaat

SEQ ID NO: 2670 - DNA, 16 bp, synthetic construct
  source 1..16: mol_type = other DNA
ctgcctgttacatcag

SEQ ID NO: 2671 - DNA, 16 bp, synthetic construct
  source 1..16: mol_type = other DNA
cctgagtgtctccagt

SEQ ID NO: 2672 - DNA, 16 bp, synthetic construct
  source 1..16: mol_type = other DNA
gatgctcaaataaaaa

SEQ ID NO: 2673 - DNA, 16 bp, synthetic construct
  source 1..16: mol_type = other DNA
gactctctgtgtttta

SEQ ID NO: 2674 - DNA, 16 bp, synthetic construct
  source 1..16: mol_type = other DNA
gcatcttggtccagta

SEQ ID NO: 2675 - DNA, 16 bp, synthetic construct
  source 1..16: mol_type = other DNA
  modified_base 5: mod_base = OTHER; note = uracil
gctttcagagctgaaa

SEQ ID NO: 2676 - DNA, 16 bp, synthetic construct
  source 1..16: mol_type = other DNA
ctgggtctctctcttg

SEQ ID NO: 2677 - DNA, 16 bp, synthetic construct
  source 1..16: mol_type = other DNA
  modified_base 5: mod_base = OTHER; note = uracil
ctcctgtccacagtat

SEQ ID NO: 2678 - DNA, 16 bp, synthetic construct
  source 1..16: mol_type = other DNA
ggcaggtcactgctga

SEQ ID NO: 2679 - DNA, 16 bp, synthetic construct
  source 1..16: mol_type = other DNA
tgcacacagacagccc

SEQ ID NO: 2680 - DNA, 16 bp, synthetic construct
  source 1..16: mol_type = other DNA
gactctttgctgtcag

SEQ ID NO: 2681 - DNA, 16 bp, synthetic construct
  source 1..16: mol_type = other DNA
ggctgttctttgcagt

SEQ ID NO: 2682 - DNA, 16 bp, synthetic construct
  source 1..16: mol_type = other DNA
ttccacatgtttgacc

SEQ ID NO: 2683 - DNA, 16 bp, synthetic construct
  source 1..16: mol_type = other DNA
catggagctgcttcga

SEQ ID NO: 2684 - DNA, 16 bp, synthetic construct
  source 1..16: mol_type = other DNA
  modified_base 5: mod_base = OTHER; note = uracil
gtgctctctcccaaga

SEQ ID NO: 2685 - DNA, 16 bp, synthetic construct
  source 1..16: mol_type = other DNA
agcccattggtgacgc

SEQ ID NO: 2686 - DNA, 16 bp, synthetic construct
  source 1..16: mol_type = other DNA
  modified_base 5: mod_base = OTHER; note = uracil
aggatatcctgatgtc

SEQ ID NO: 2687 - DNA, 16 bp, synthetic construct
  source 1..16: mol_type = other DNA
cgctgttgtatcattg

SEQ ID NO: 2688 - DNA, 16 bp, synthetic construct
  source 1..16: mol_type = other DNA
aatggtttcaaactgg

SEQ ID NO: 2689 - DNA, 16 bp, synthetic construct
  source 1..16: mol_type = other DNA
  modified_base 5: mod_base = OTHER; note = uracil
gttatcactaggtaac

SEQ ID NO: 2690 - DNA, 16 bp, synthetic construct
  source 1..16: mol_type = other DNA
atctgggttacaataa

SEQ ID NO: 2691 - DNA, 16 bp, synthetic construct
  source 1..16: mol_type = other DNA
  modified_base 5: mod_base = OTHER; note = uracil
agtttctcccacaaga

SEQ ID NO: 2692 - DNA, 16 bp, synthetic construct
  source 1..16: mol_type = other DNA
  modified_base 5: mod_base = OTHER; note = uracil
gctatcacactctttc

SEQ ID NO: 2693 - DNA, 16 bp, synthetic construct
  source 1..16: mol_type = other DNA
gcatgaattcgctttt

SEQ ID NO: 2694 - DNA, 16 bp, synthetic construct
  source 1..16: mol_type = other DNA
  modified_base 5: mod_base = OTHER; note = uracil
gccatgggaaccatgt

SEQ ID NO: 2695 - DNA, 16 bp, synthetic construct
  source 1..16: mol_type = other DNA
ggccatgtagatcggt

SEQ ID NO: 2696 - DNA, 16 bp, synthetic construct
  source 1..16: mol_type = other DNA
agaagcattattgcac

SEQ ID NO: 2697 - DNA, 16 bp, synthetic construct
  source 1..16: mol_type = other DNA
ccaccttattatcact

SEQ ID NO: 2698 - DNA, 16 bp, synthetic construct
  source 1..16: mol_type = other DNA
tgaggtttgcctaggt

SEQ ID NO: 2699 - DNA, 16 bp, synthetic construct
  source 1..16: mol_type = other DNA
tcagcacgaggtaagc

SEQ ID NO: 2700 - DNA, 16 bp, synthetic construct
  source 1..16: mol_type = other DNA
catggaaagcaatggt

SEQ ID NO: 2701 - DNA, 16 bp, synthetic construct
  source 1..16: mol_type = other DNA
  modified_base 5: mod_base = OTHER; note = uracil
tgtctccttatgaaag

SEQ ID NO: 2702 - DNA, 16 bp, synthetic construct
  source 1..16: mol_type = other DNA
acaagtcatctgttca

SEQ ID NO: 2703 - DNA, 16 bp, synthetic construct
  source 1..16: mol_type = other DNA
agttcattatctcctt

SEQ ID NO: 2704 - DNA, 16 bp, synthetic construct
  source 1..16: mol_type = other DNA
gcaggtcaaaacctgt

SEQ ID NO: 2705 - DNA, 16 bp, synthetic construct
  source 1..16: mol_type = other DNA
tagagctgggtcatgt

SEQ ID NO: 2706 - DNA, 16 bp, synthetic construct
  source 1..16: mol_type = other DNA
  modified_base 5: mod_base = OTHER; note = uracil
ggttttctgtagccta

SEQ ID NO: 2707 - DNA, 16 bp, synthetic construct
  source 1..16: mol_type = other DNA
  modified_base 5: mod_base = OTHER; note = uracil
ttcttctcaatgattt

SEQ ID NO: 2708 - DNA, 16 bp, synthetic construct
  source 1..16: mol_type = other DNA
  modified_base 5: mod_base = OTHER; note = uracil
ctactgcttcttggct

SEQ ID NO: 2709 - DNA, 16 bp, synthetic construct
  source 1..16: mol_type = other DNA
  modified_base 5: mod_base = OTHER; note = uracil
gtgttttacgactggc

SEQ ID NO: 2710 - DNA, 16 bp, synthetic construct
  source 1..16: mol_type = other DNA
  modified_base 5: mod_base = OTHER; note = uracil
ctgcttcgatcacatc

SEQ ID NO: 2711 - DNA, 16 bp, synthetic construct
  source 1..16: mol_type = other DNA
  modified_base 5: mod_base = OTHER; note = uracil
agggtattattgatag

SEQ ID NO: 2712 - DNA, 16 bp, synthetic construct
  source 1..16: mol_type = other DNA
  modified_base 5: mod_base = OTHER; note = uracil
tagctcatggaaagca

SEQ ID NO: 2713 - DNA, 16 bp, synthetic construct
  source 1..16: mol_type = other DNA
  modified_base 5: mod_base = OTHER; note = uracil
cgtgtgtattattgac

SEQ ID NO: 2714 - DNA, 16 bp, synthetic construct
  source 1..16: mol_type = other DNA
  modified_base 5: mod_base = OTHER; note = uracil
caccttccttttgctt

SEQ ID NO: 2715 - DNA, 16 bp, synthetic construct
  source 1..16: mol_type = other DNA
  modified_base 5: mod_base = OTHER; note = uracil
tcaatgtccacttcct

SEQ ID NO: 2716 - DNA, 16 bp, synthetic construct
  source 1..16: mol_type = other DNA
cagacttccggcttta

SEQ ID NO: 2717 - DNA, 16 bp, synthetic construct
  source 1..16: mol_type = other DNA
  modified_base 5: mod_base = OTHER; note = uracil
cctcttgcacctttct

SEQ ID NO: 2718 - DNA, 16 bp, synthetic construct
  source 1..16: mol_type = other DNA
  modified_base 5: mod_base = OTHER; note = uracil
actgtccaataccgcc

SEQ ID NO: 2719 - DNA, 16 bp, synthetic construct
  source 1..16: mol_type = other DNA
  modified_base 5: mod_base = OTHER; note = uracil
gatatctggtcttgtt

SEQ ID NO: 2720 - DNA, 16 bp, synthetic construct
  source 1..16: mol_type = other DNA
agctcagtaagagcac

SEQ ID NO: 2721 - DNA, 16 bp, synthetic construct
  source 1..16: mol_type = other DNA
gttcgagggctgagta

SEQ ID NO: 2722 - DNA, 16 bp, synthetic construct
  source 1..16: mol_type = other DNA
tttgccactgatttgg

SEQ ID NO: 2723 - DNA, 16 bp, synthetic construct
  source 1..16: mol_type = other DNA
  modified_base 5: mod_base = OTHER; note = uracil
ttcctacagcacacac

SEQ ID NO: 2724 - DNA, 16 bp, synthetic construct
  source 1..16: mol_type = other DNA
tggtcctaaagaaatg

SEQ ID NO: 2725 - DNA, 16 bp, synthetic construct
  source 1..16: mol_type = other DNA
tcacacttgactgaaa

SEQ ID NO: 2726 - DNA, 16 bp, synthetic construct
  source 1..16: mol_type = other DNA
aattcacacttaatct

SEQ ID NO: 2727 - DNA, 16 bp, synthetic construct
  source 1..16: mol_type = other DNA
ttgtattcctggcaga

SEQ ID NO: 2728 - DNA, 16 bp, synthetic construct
  source 1..16: mol_type = other DNA
  modified_base 5: mod_base = OTHER; note = uracil
tcagtacactgaccaa

SEQ ID NO: 2729 - DNA, 16 bp, synthetic construct
  source 1..16: mol_type = other DNA
gacggcctctgcctgg

SEQ ID NO: 2730 - DNA, 16 bp, synthetic construct
  source 1..16: mol_type = other DNA
  modified_base 5: mod_base = OTHER; note = uracil
cctttgccctcacttg

SEQ ID NO: 2731 - DNA, 16 bp, synthetic construct
  source 1..16: mol_type = other DNA
acttccgatattccag

SEQ ID NO: 2732 - DNA, 16 bp, synthetic construct
  source 1..16: mol_type = other DNA
acaggtgctaggtttc

SEQ ID NO: 2733 - DNA, 16 bp, synthetic construct
  source 1..16: mol_type = other DNA
gtgtatccaggcagtc

SEQ ID NO: 2734 - DNA, 16 bp, synthetic construct
  source 1..16: mol_type = other DNA
atgtactgtaagtcct

SEQ ID NO: 2735 - DNA, 16 bp, synthetic construct
  source 1..16: mol_type = other DNA
ctcacaccaaagtgat

SEQ ID NO: 2736 - DNA, 16 bp, synthetic construct
  source 1..16: mol_type = other DNA
ttctctcactgatatc

SEQ ID NO: 2737 - DNA, 16 bp, synthetic construct
  source 1..16: mol_type = other DNA
ggttctgacattgttt

SEQ ID NO: 2738 - DNA, 16 bp, synthetic construct
  source 1..16: mol_type = other DNA
cctgccgggcaccata

SEQ ID NO: 2739 - DNA, 16 bp, synthetic construct
  source 1..16: mol_type = other DNA
ctccatacccccccca

SEQ ID NO: 2740 - DNA, 16 bp, synthetic construct
  source 1..16: mol_type = other DNA
  modified_base 5: mod_base = OTHER; note = uracil
aatgtgacaaggcctt

SEQ ID NO: 2741 - DNA, 16 bp, synthetic construct
  source 1..16: mol_type = other DNA
cctcctaacagattgt

SEQ ID NO: 2742 - DNA, 16 bp, synthetic construct
  source 1..16: mol_type = other DNA
cagggcatgtctgcct

SEQ ID NO: 2743 - DNA, 16 bp, synthetic construct
  source 1..16: mol_type = other DNA
  modified_base 5: mod_base = OTHER; note = uracil
gaaatctctgcctgag

SEQ ID NO: 2744 - DNA, 16 bp, synthetic construct
  source 1..16: mol_type = other DNA
  modified_base 5: mod_base = OTHER; note = uracil
gatctttctggatgct

SEQ ID NO: 2745 - DNA, 16 bp, synthetic construct
  source 1..16: mol_type = other DNA
  modified_base 5: mod_base = OTHER; note = uracil
atttttttggccagca

SEQ ID NO: 2746 - DNA, 16 bp, synthetic construct
  source 1..16: mol_type = other DNA
tccacctgctgaactg

SEQ ID NO: 2747 - DNA, 16 bp, synthetic construct
  source 1..16: mol_type = other DNA
  modified_base 5: mod_base = OTHER; note = uracil
ggcttctgtggctttc

SEQ ID NO: 2748 - DNA, 16 bp, synthetic construct
  source 1..16: mol_type = other DNA
  modified_base 5: mod_base = OTHER; note = uracil
agactctttgctgtca

SEQ ID NO: 2749 - DNA, 16 bp, synthetic construct
  source 1..16: mol_type = other DNA
  modified_base 5: mod_base = OTHER; note = uracil
aggctgttctttgcag

SEQ ID NO: 2750 - DNA, 16 bp, synthetic construct
  source 1..16: mol_type = other DNA
gtctcaaaatctatag

SEQ ID NO: 2751 - DNA, 16 bp, synthetic construct
  source 1..16: mol_type = other DNA
attccacatgtttgac

SEQ ID NO: 2752 - DNA, 16 bp, synthetic construct
  source 1..16: mol_type = other DNA
ccatggagctgcttcg

SEQ ID NO: 2753 - DNA, 16 bp, synthetic construct
  source 1..16: mol_type = other DNA
ggtgctctctcccaag

SEQ ID NO: 2754 - DNA, 16 bp, synthetic construct
  source 1..16: mol_type = other DNA
cctgcagagtggcagg

SEQ ID NO: 2755 - DNA, 16 bp, synthetic construct
  source 1..16: mol_type = other DNA
agatggctcctgcaca

SEQ ID NO: 2756 - DNA, 16 bp, synthetic construct
  source 1..16: mol_type = other DNA
tcttgtctcctcctgt

SEQ ID NO: 2757 - DNA, 16 bp, synthetic construct
  source 1..16: mol_type = other DNA
  modified_base 5: mod_base = OTHER; note = uracil
ggcatcattcagccca

SEQ ID NO: 2758 - DNA, 16 bp, synthetic construct
  source 1..16: mol_type = other DNA
agacacactcaggata

SEQ ID NO: 2759 - DNA, 16 bp, synthetic construct
  source 1..16: mol_type = other DNA
actgaccaccttcttt

SEQ ID NO: 2760 - DNA, 16 bp, synthetic construct
  source 1..16: mol_type = other DNA
tgcactgtagtataaa

SEQ ID NO: 2761 - DNA, 16 bp, synthetic construct
  source 1..16: mol_type = other DNA
  modified_base 5: mod_base = OTHER; note = uracil
taccttgtgaagcaat

SEQ ID NO: 2762 - DNA, 16 bp, synthetic construct
  source 1..16: mol_type = other DNA
cagtgaaattttcgaa

SEQ ID NO: 2763 - DNA, 16 bp, synthetic construct
  source 1..16: mol_type = other DNA
attcacctgccatggg

SEQ ID NO: 2764 - DNA, 16 bp, synthetic construct
  source 1..16: mol_type = other DNA
ggcaatggactccatc

SEQ ID NO: 2765 - DNA, 16 bp, synthetic construct
  source 1..16: mol_type = other DNA
gttggactccacctta

SEQ ID NO: 2766 - DNA, 16 bp, synthetic construct
  source 1..16: mol_type = other DNA
acatgttttggatcta

SEQ ID NO: 2767 - DNA, 16 bp, synthetic construct
  source 1..16: mol_type = other DNA
tgtgctaggtacaatt

SEQ ID NO: 2768 - DNA, 16 bp, synthetic construct
  source 1..16: mol_type = other DNA
  modified_base 5: mod_base = OTHER; note = uracil
acgatccaagtgaggt

SEQ ID NO: 2769 - DNA, 16 bp, synthetic construct
  source 1..16: mol_type = other DNA
tacactgagctcagca

SEQ ID NO: 2770 - DNA, 16 bp, synthetic construct
  source 1..16: mol_type = other DNA
cctgatcatctcaaac

SEQ ID NO: 2771 - DNA, 16 bp, synthetic construct
  source 1..16: mol_type = other DNA
tcagcatgaaacaagt

SEQ ID NO: 2772 - DNA, 16 bp, synthetic construct
  source 1..16: mol_type = other DNA
cttgcttgtaagttca

SEQ ID NO: 2773 - DNA, 16 bp, synthetic construct
  source 1..16: mol_type = other DNA
gtggacctgtgcaggt

SEQ ID NO: 2774 - DNA, 16 bp, synthetic construct
  source 1..16: mol_type = other DNA
gtaggcagcatagagc

SEQ ID NO: 2775 - DNA, 16 bp, synthetic construct
  source 1..16: mol_type = other DNA
  modified_base 5: mod_base = OTHER; note = uracil
gcagtttggtggtttt

SEQ ID NO: 2776 - DNA, 16 bp, synthetic construct
  source 1..16: mol_type = other DNA
acctgccaggcagata

SEQ ID NO: 2777 - DNA, 16 bp, synthetic construct
  source 1..16: mol_type = other DNA
gggaacttgtctactg

SEQ ID NO: 2778 - DNA, 16 bp, synthetic construct
  source 1..16: mol_type = other DNA
  modified_base 5: mod_base = OTHER; note = uracil
gacattttttaaggca

SEQ ID NO: 2779 - DNA, 16 bp, synthetic construct
  source 1..16: mol_type = other DNA
  modified_base 5: mod_base = OTHER; note = uracil
tgtgttttacgactgg

SEQ ID NO: 2780 - DNA, 16 bp, synthetic construct
  source 1..16: mol_type = other DNA
  modified_base 5: mod_base = OTHER; note = uracil
aggatgctgggtctct

SEQ ID NO: 2781 - DNA, 16 bp, synthetic construct
  source 1..16: mol_type = other DNA
  modified_base 5: mod_base = OTHER; note = uracil
tagatcggtattaaga

SEQ ID NO: 2782 - DNA, 16 bp, synthetic construct
  source 1..16: mol_type = other DNA
  modified_base 5: mod_base = OTHER; note = uracil
ttattgacctggtaaa

SEQ ID NO: 2783 - DNA, 16 bp, synthetic construct
  source 1..16: mol_type = other DNA
ttctccaagtttagat

SEQ ID NO: 2784 - DNA, 16 bp, synthetic construct
  source 1..16: mol_type = other DNA
cctgcatccacataac

SEQ ID NO: 2785 - DNA, 16 bp, synthetic construct
  source 1..16: mol_type = other DNA
tgaaggacaggcttaa

SEQ ID NO: 2786 - DNA, 16 bp, synthetic construct
  source 1..16: mol_type = other DNA
gccagctcactgattg

SEQ ID NO: 2787 - DNA, 16 bp, synthetic construct
  source 1..16: mol_type = other DNA
cagaccatctcagact

SEQ ID NO: 2788 - DNA, 16 bp, synthetic construct
  source 1..16: mol_type = other DNA
  modified_base 5: mod_base = OTHER; note = uracil
gccttcccaacctctt

SEQ ID NO: 2789 - DNA, 16 bp, synthetic construct
  source 1..16: mol_type = other DNA
cagtgtcatcctgtgc

SEQ ID NO: 2790 - DNA, 16 bp, synthetic construct
  source 1..16: mol_type = other DNA
ttttgttgaagatatc

SEQ ID NO: 2791 - DNA, 16 bp, synthetic construct
  source 1..16: mol_type = other DNA
agttcagcatagctca

SEQ ID NO: 2792 - DNA, 16 bp, synthetic construct
  source 1..16: mol_type = other DNA
gactgcctgtgttcga

SEQ ID NO: 2793 - DNA, 16 bp, synthetic construct
  source 1..16: mol_type = other DNA
  modified_base 5: mod_base = OTHER; note = uracil
aatttcctacagcaca

SEQ ID NO: 2794 - DNA, 16 bp, synthetic construct
  source 1..16: mol_type = other DNA
gcctggtcctaaagaa

SEQ ID NO: 2795 - DNA, 16 bp, synthetic construct
  source 1..16: mol_type = other DNA
aattcacacttgactg

SEQ ID NO: 2796 - DNA, 16 bp, synthetic construct
  source 1..16: mol_type = other DNA
agctctattaaattca

SEQ ID NO: 2797 - DNA, 16 bp, synthetic construct
  source 1..16: mol_type = other DNA
gctgacaaatgatcaa

SEQ ID NO: 2798 - DNA, 16 bp, synthetic construct
  source 1..16: mol_type = other DNA
  modified_base 5: mod_base = OTHER; note = uracil
gtgctgtgcagaaatt

SEQ ID NO: 2799 - DNA, 16 bp, synthetic construct
  source 1..16: mol_type = other DNA
gtctcaactccctttg

SEQ ID NO: 2800 - DNA, 16 bp, synthetic construct
  source 1..16: mol_type = other DNA
gttggtgctggaaaaa

SEQ ID NO: 2801 - DNA, 16 bp, synthetic construct
  source 1..16: mol_type = other DNA
  modified_base 5: mod_base = OTHER; note = uracil
actgtcattcaaagca

SEQ ID NO: 2802 - DNA, 16 bp, synthetic construct
  source 1..16: mol_type = other DNA
tgtccacctggcagat

SEQ ID NO: 2803 - DNA, 16 bp, synthetic construct
  source 1..16: mol_type = other DNA
  modified_base 5: mod_base = OTHER; note = uracil
gagctggaatgtgtat

SEQ ID NO: 2804 - DNA, 16 bp, synthetic construct
  source 1..16: mol_type = other DNA
ctgggagaggtctgtc

SEQ ID NO: 2805 - DNA, 16 bp, synthetic construct
  source 1..16: mol_type = other DNA
gtgtactttctacctt

SEQ ID NO: 2806 - DNA, 16 bp, synthetic construct
  source 1..16: mol_type = other DNA
  modified_base 5: mod_base = OTHER; note = uracil
tggttctgacattgtt

SEQ ID NO: 2807 - DNA, 16 bp, synthetic construct
  source 1..16: mol_type = other DNA
  modified_base 5: mod_base = OTHER; note = uracil
gtcctgggccttaagt

SEQ ID NO: 2808 - DNA, 16 bp, synthetic construct
  source 1..16: mol_type = other DNA
aagagcagcagcttaa

SEQ ID NO: 2809 - DNA, 16 bp, synthetic construct
  source 1..16: mol_type = other DNA
atccacacctcctgcc

SEQ ID NO: 2810 - DNA, 16 bp, synthetic construct
  source 1..16: mol_type = other DNA
  modified_base 5: mod_base = OTHER; note = uracil
ggctttctaaaatgtg

SEQ ID NO: 2811 - DNA, 16 bp, synthetic construct
  source 1..16: mol_type = other DNA
  modified_base 5: mod_base = OTHER; note = uracil
acagtcagaacctcct

SEQ ID NO: 2812 - DNA, 16 bp, synthetic construct
  source 1..16: mol_type = other DNA
gccagggctcacaggt

SEQ ID NO: 2813 - DNA, 16 bp, synthetic construct
  source 1..16: mol_type = other DNA
  modified_base 5: mod_base = OTHER; note = uracil
tacttcagctgaaaga

SEQ ID NO: 2814 - DNA, 16 bp, synthetic construct
  source 1..16: mol_type = other DNA
  modified_base 5: mod_base = OTHER; note = uracil
cagctctttttccacc

SEQ ID NO: 2815 - DNA, 16 bp, synthetic construct
  source 1..16: mol_type = other DNA
tgtagcctgtaatgtt

SEQ ID NO: 2816 - DNA, 16 bp, synthetic construct
  source 1..16: mol_type = other DNA
ggctgtaaactttgtt

SEQ ID NO: 2817 - DNA, 16 bp, synthetic construct
  source 1..16: mol_type = other DNA
  modified_base 5: mod_base = OTHER; note = uracil
ctcttgtctcctcctg

SEQ ID NO: 2818 - DNA, 16 bp, synthetic construct
  source 1..16: mol_type = other DNA
ccgagggaggccaaag

SEQ ID NO: 2819 - DNA, 16 bp, synthetic construct
  source 1..16: mol_type = other DNA
cctcccattattcatt

SEQ ID NO: 2820 - DNA, 16 bp, synthetic construct
  source 1..16: mol_type = other DNA
  modified_base 5: mod_base = OTHER; note = uracil
gctttccaggattcat

SEQ ID NO: 2821 - DNA, 16 bp, synthetic construct
  source 1..16: mol_type = other DNA
tgtcaggagaggctgt

SEQ ID NO: 2822 - DNA, 16 bp, synthetic construct
  source 1..16: mol_type = other DNA
tgcagtgatgtctcaa

SEQ ID NO: 2823 - DNA, 16 bp, synthetic construct
  source 1..16: mol_type = other DNA
  modified_base 5: mod_base = OTHER; note = uracil
agtatttccactcctt

SEQ ID NO: 2824 - DNA, 16 bp, synthetic construct
  source 1..16: mol_type = other DNA
ttgacccggcctgggc

SEQ ID NO: 2825 - DNA, 16 bp, synthetic construct
  source 1..16: mol_type = other DNA
atccccctgggtgctc

SEQ ID NO: 2826 - DNA, 16 bp, synthetic construct
  source 1..16: mol_type = other DNA
acctctgctctttcaa

SEQ ID NO: 2827 - DNA, 16 bp, synthetic construct
  source 1..16: mol_type = other DNA
tggagtcgctggcatc

SEQ ID NO: 2828 - DNA, 16 bp, synthetic construct
  source 1..16: mol_type = other DNA
caccatctgcagacac

SEQ ID NO: 2829 - DNA, 16 bp, synthetic construct
  source 1..16: mol_type = other DNA
ccctgatgtcctctcc

SEQ ID NO: 2830 - DNA, 16 bp, synthetic construct
  source 1..16: mol_type = other DNA
ccagggactctgcact

SEQ ID NO: 2831 - DNA, 16 bp, synthetic construct
  source 1..16: mol_type = other DNA
ttaccttgtgaagcaa

SEQ ID NO: 2832 - DNA, 16 bp, synthetic construct
  source 1..16: mol_type = other DNA
  modified_base 5: mod_base = OTHER; note = uracil
acagtgaaattttcga

SEQ ID NO: 2833 - DNA, 16 bp, synthetic construct
  source 1..16: mol_type = other DNA
  modified_base 5: mod_base = OTHER; note = uracil
tctttcatagttaaaa

SEQ ID NO: 2834 - DNA, 16 bp, synthetic construct
  source 1..16: mol_type = other DNA
aacagtactgtgctag

SEQ ID NO: 2835 - DNA, 16 bp, synthetic construct
  source 1..16: mol_type = other DNA
  modified_base 5: mod_base = OTHER; note = uracil
ttattcacctgccatg

SEQ ID NO: 2836 - DNA, 16 bp, synthetic construct
  source 1..16: mol_type = other DNA
  modified_base 5: mod_base = OTHER; note = uracil
tgtttgaacataaaag

SEQ ID NO: 2837 - DNA, 16 bp, synthetic construct
  source 1..16: mol_type = other DNA
aaggcaatggactcca

SEQ ID NO: 2838 - DNA, 16 bp, synthetic construct
  source 1..16: mol_type = other DNA
  modified_base 5: mod_base = OTHER; note = uracil
ctgttggactccacct

SEQ ID NO: 2839 - DNA, 16 bp, synthetic construct
  source 1..16: mol_type = other DNA
ttttggagtgtacact

SEQ ID NO: 2840 - DNA, 16 bp, synthetic construct
  source 1..16: mol_type = other DNA
  modified_base 5: mod_base = OTHER; note = uracil
actctgccttgatact

SEQ ID NO: 2841 - DNA, 16 bp, synthetic construct
  source 1..16: mol_type = other DNA
  modified_base 5: mod_base = OTHER; note = uracil
ccgttctgatcctgat

SEQ ID NO: 2842 - DNA, 16 bp, synthetic construct
  source 1..16: mol_type = other DNA
tgcaggatcttcagca

SEQ ID NO: 2843 - DNA, 16 bp, synthetic construct
  source 1..16: mol_type = other DNA
  modified_base 5: mod_base = OTHER; note = uracil
tgaatgttgtcttgct

SEQ ID NO: 2844 - DNA, 16 bp, synthetic construct
  source 1..16: mol_type = other DNA
  modified_base 5: mod_base = OTHER; note = uracil
tgagtttcttgtaggc

SEQ ID NO: 2845 - DNA, 16 bp, synthetic construct
  source 1..16: mol_type = other DNA
tcatccatttagccag

SEQ ID NO: 2846 - DNA, 16 bp, synthetic construct
  source 1..16: mol_type = other DNA
tgaagttgtttgtata

SEQ ID NO: 2847 - DNA, 16 bp, synthetic construct
  source 1..16: mol_type = other DNA
aatggtgtctgggaac

SEQ ID NO: 2848 - DNA, 16 bp, synthetic construct
  source 1..16: mol_type = other DNA
gctgcttctcctgtta

SEQ ID NO: 2849 - DNA, 16 bp, synthetic construct
  source 1..16: mol_type = other DNA
  modified_base 5: mod_base = OTHER; note = uracil
aggctgctattaaaga

SEQ ID NO: 2850 - DNA, 16 bp, synthetic construct
  source 1..16: mol_type = other DNA
  modified_base 5: mod_base = OTHER; note = uracil
gctattaaagacatgc

SEQ ID NO: 2851 - DNA, 16 bp, synthetic construct
  source 1..16: mol_type = other DNA
  modified_base 5: mod_base = OTHER; note = uracil
gggctcagagaaggaa

SEQ ID NO: 2852 - DNA, 16 bp, synthetic construct
  source 1..16: mol_type = other DNA
  modified_base 5: mod_base = OTHER; note = uracil
tctattggagaagtgt

SEQ ID NO: 2853 - DNA, 16 bp, synthetic construct
  source 1..16: mol_type = other DNA
  modified_base 5: mod_base = OTHER; note = uracil
tgttttacgactggca

SEQ ID NO: 2854 - DNA, 16 bp, synthetic construct
  source 1..16: mol_type = other DNA
  modified_base 5: mod_base = OTHER; note = uracil
tctataggatgctggg

SEQ ID NO: 2855 - DNA, 16 bp, synthetic construct
  source 1..16: mol_type = other DNA
ggatgctgggtctctc

SEQ ID NO: 2856 - DNA, 16 bp, synthetic construct
  source 1..16: mol_type = other DNA
  modified_base 5: mod_base = OTHER; note = uracil
caatttagctctatta

SEQ ID NO: 2857 - DNA, 16 bp, synthetic construct
  source 1..16: mol_type = other DNA
  modified_base 5: mod_base = OTHER; note = uracil
cagatattagctcatg

SEQ ID NO: 2858 - DNA, 16 bp, synthetic construct
  source 1..16: mol_type = other DNA
caacctcttgcacctt

SEQ ID NO: 2859 - DNA, 16 bp, synthetic construct
  source 1..16: mol_type = other DNA
tcctccgttgttactt

SEQ ID NO: 2860 - DNA, 16 bp, synthetic construct
  source 1..16: mol_type = other DNA
  modified_base 5: mod_base = OTHER; note = uracil
ccgttgttacttcagc

SEQ ID NO: 2861 - DNA, 16 bp, synthetic construct
  source 1..16: mol_type = other DNA
ctttgcagtgatgtct

SEQ ID NO: 2862 - DNA, 16 bp, synthetic construct
  source 1..16: mol_type = other DNA
ctttccaggattcatc

SEQ ID NO: 2863 - DNA, 16 bp, synthetic construct
  source 1..16: mol_type = other DNA
  modified_base 5: mod_base = OTHER; note = uracil
gaactgaccaccttct

SEQ ID NO: 2864 - DNA, 16 bp, synthetic construct
  source 1..16: mol_type = other DNA
tgcagaattgataaca

SEQ ID NO: 2865 - DNA, 16 bp, synthetic construct
  source 1..16: mol_type = other DNA
  modified_base 5: mod_base = OTHER; note = uracil
gattttaagagtccac

SEQ ID NO: 2866 - DNA, 16 bp, synthetic construct
  source 1..16: mol_type = other DNA
aagaagtgttgtccaa

SEQ ID NO: 2867 - DNA, 16 bp, synthetic construct
  source 1..16: mol_type = other DNA
  modified_base 5: mod_base = OTHER; note = uracil
ggttttaagttatctc

SEQ ID NO: 2868 - DNA, 16 bp, synthetic construct
  source 1..16: mol_type = other DNA
  modified_base 5: mod_base = OTHER; note = uracil
atattgtgtgtctcag

SEQ ID NO: 2869 - DNA, 16 bp, synthetic construct
  source 1..16: mol_type = other DNA
  modified_base 5: mod_base = OTHER; note = uracil
aaatttcagtgctccc

SEQ ID NO: 2870 - DNA, 16 bp, synthetic construct
  source 1..16: mol_type = other DNA
ccaagaactgaccacc

SEQ ID NO: 2871 - DNA, 16 bp, synthetic construct
  source 1..16: mol_type = other DNA
  modified_base 5: mod_base = OTHER; note = uracil
gtgatatgaatggtat

SEQ ID NO: 2872 - DNA, 16 bp, synthetic construct
  source 1..16: mol_type = other DNA
gtgtgtattattgacc

SEQ ID NO: 2873 - DNA, 16 bp, synthetic construct
  source 1..16: mol_type = other DNA
accagctgatgagatg

SEQ ID NO: 2874 - DNA, 16 bp, synthetic construct
  source 1..16: mol_type = other DNA
  modified_base 5: mod_base = OTHER; note = uracil
ttagtatccttcaatg

SEQ ID NO: 2875 - DNA, 16 bp, synthetic construct
  source 1..16: mol_type = other DNA
  modified_base 5: mod_base = OTHER; note = uracil
ggattaaggagttctg

SEQ ID NO: 2876 - DNA, 16 bp, synthetic construct
  source 1..16: mol_type = other DNA
  modified_base 5: mod_base = OTHER; note = uracil
ttattatagggttgaa

SEQ ID NO: 2877 - DNA, 16 bp, synthetic construct
  source 1..16: mol_type = other DNA
caatgctgattcaggc

SEQ ID NO: 2878 - DNA, 16 bp, synthetic construct
  source 1..16: mol_type = other DNA
  modified_base 5: mod_base = OTHER; note = uracil
gtgatattgtataagg

SEQ ID NO: 2879 - DNA, 16 bp, synthetic construct
  source 1..16: mol_type = other DNA
  modified_base 5: mod_base = OTHER; note = uracil
accgtcaagtaatgag

SEQ ID NO: 2880 - DNA, 16 bp, synthetic construct
  source 1..16: mol_type = other DNA
  modified_base 5: mod_base = OTHER; note = uracil
cttttgaatctgtcca

SEQ ID NO: 2881 - DNA, 16 bp, synthetic construct
  source 1..16: mol_type = other DNA
ggtaccattactgaga

SEQ ID NO: 2882 - DNA, 16 bp, synthetic construct
  source 1..16: mol_type = other DNA
  modified_base 5: mod_base = OTHER; note = uracil
agatttaataggtctt

SEQ ID NO: 2883 - DNA, 16 bp, synthetic construct
  source 1..16: mol_type = other DNA
  modified_base 5: mod_base = OTHER; note = uracil
actatagtatgatagc

SEQ ID NO: 2884 - DNA, 16 bp, synthetic construct
  source 1..16: mol_type = other DNA
  modified_base 5: mod_base = OTHER; note = uracil
atagtatgatagcaca

SEQ ID NO: 2885 - DNA, 16 bp, synthetic construct
  source 1..16: mol_type = other DNA
  modified_base 5: mod_base = OTHER; note = uracil
ttgttatactgatggg

SEQ ID NO: 2886 - DNA, 16 bp, synthetic construct
  source 1..16: mol_type = other DNA
  modified_base 5: mod_base = OTHER; note = uracil
gctgtaaactttgttc

SEQ ID NO: 2887 - DNA, 16 bp, synthetic construct
  source 1..16: mol_type = other DNA
  modified_base 5: mod_base = OTHER; note = uracil
gaattgaagttagggt

SEQ ID NO: 2888 - DNA, 16 bp, synthetic construct
  source 1..16: mol_type = other DNA
  modified_base 5: mod_base = OTHER; note = uracil
ggtttcaaactgggag

SEQ ID NO: 2889 - DNA, 16 bp, synthetic construct
  source 1..16: mol_type = other DNA
  modified_base 5: mod_base = OTHER; note = uracil
aaactgggagctgtac

SEQ ID NO: 2890 - DNA, 16 bp, synthetic construct
  source 1..16: mol_type = other DNA
  modified_base 5: mod_base = OTHER; note = uracil
tctctgtgttttacga

SEQ ID NO: 2891 - DNA, 16 bp, synthetic construct
  source 1..16: mol_type = other DNA
  modified_base 5: mod_base = OTHER; note = uracil
actttcctccgttgtt

SEQ ID NO: 2892 - DNA, 16 bp, synthetic construct
  source 1..16: mol_type = other DNA
  modified_base 5: mod_base = OTHER; note = uracil
gtgatgtctcaaaatc

SEQ ID NO: 2893 - DNA, 16 bp, synthetic construct
  source 1..16: mol_type = other DNA
cctccccctgatgtcc

SEQ ID NO: 2894 - DNA, 16 bp, synthetic construct
  source 1..16: mol_type = other DNA
gataacaggtaaatta

SEQ ID NO: 2895 - DNA, 16 bp, synthetic construct
  source 1..16: mol_type = other DNA
  modified_base 5: mod_base = OTHER; note = uracil
aatatctattggagaa

SEQ ID NO: 2896 - DNA, 16 bp, synthetic construct
  source 1..16: mol_type = other DNA
ctgtgttttacgactg

SEQ ID NO: 2897 - DNA, 16 bp, synthetic construct
  source 1..16: mol_type = other DNA
  modified_base 5: mod_base = OTHER; note = uracil
actttcagatattagc

SEQ ID NO: 2898 - DNA, 16 bp, synthetic construct
  source 1..16: mol_type = other DNA
acctcttgcacctttc

SEQ ID NO: 2899 - DNA, 16 bp, synthetic construct
  source 1..16: mol_type = other DNA
  modified_base 5: mod_base = OTHER; note = uracil
ttcctccgttgttact

SEQ ID NO: 2900 - DNA, 16 bp, synthetic construct
  source 1..16: mol_type = other DNA
  modified_base 5: mod_base = OTHER; note = uracil
tccgttgttacttcag

SEQ ID NO: 2901 - DNA, 16 bp, synthetic construct
  source 1..16: mol_type = other DNA
  modified_base 5: mod_base = OTHER; note = uracil
tctttgcagtgatgtc

SEQ ID NO: 2902 - DNA, 16 bp, synthetic construct
  source 1..16: mol_type = other DNA
  modified_base 5: mod_base = OTHER; note = uracil
gcagtgatgtctcaaa

SEQ ID NO: 2903 - DNA, 16 bp, synthetic construct
  source 1..16: mol_type = other DNA
  modified_base 5: mod_base = OTHER; note = uracil
gagctttccaggattc

SEQ ID NO: 2904 - DNA, 16 bp, synthetic construct
  source 1..16: mol_type = other DNA
tgatgtcctctccaag

SEQ ID NO: 2905 - DNA, 16 bp, synthetic construct
  source 1..16: mol_type = other DNA
agaactgaccaccttc

SEQ ID NO: 2906 - DNA, 16 bp, synthetic construct
  source 1..16: mol_type = other DNA
  modified_base 5: mod_base = OTHER; note = uracil
gagataatgtgaagct

SEQ ID NO: 2907 - DNA, 16 bp, synthetic construct
  source 1..16: mol_type = other DNA
  modified_base 5: mod_base = OTHER; note = uracil
actatcatatgaaagc

SEQ ID NO: 2908 - DNA, 16 bp, synthetic construct
  source 1..16: mol_type = other DNA
  modified_base 5: mod_base = OTHER; note = uracil
gaattgataacaggta

SEQ ID NO: 2909 - DNA, 16 bp, synthetic construct
  source 1..16: mol_type = other DNA
  modified_base 5: mod_base = OTHER; note = uracil
gcagtaatattaaagc

SEQ ID NO: 2910 - DNA, 16 bp, synthetic construct
  source 1..16: mol_type = other DNA
  modified_base 5: mod_base = OTHER; note = uracil
gtgattttaagagtcc

SEQ ID NO: 2911 - DNA, 16 bp, synthetic construct
  source 1..16: mol_type = other DNA
  modified_base 5: mod_base = OTHER; note = uracil
gaagtgttgtccaaaa

SEQ ID NO: 2912 - DNA, 16 bp, synthetic construct
  source 1..16: mol_type = other DNA
  modified_base 5: mod_base = OTHER; note = uracil
aagttattatatggct

SEQ ID NO: 2913 - DNA, 16 bp, synthetic construct
  source 1..16: mol_type = other DNA
  modified_base 5: mod_base = OTHER; note = uracil
gatatgaatggtatga

SEQ ID NO: 2914 - DNA, 16 bp, synthetic construct
  source 1..16: mol_type = other DNA
  modified_base 5: mod_base = OTHER; note = uracil
gtattattgacctggt

SEQ ID NO: 2915 - DNA, 16 bp, synthetic construct
  source 1..16: mol_type = other DNA
  modified_base 5: mod_base = OTHER; note = uracil
agaatagcccatcacg

SEQ ID NO: 2916 - DNA, 16 bp, synthetic construct
  source 1..16: mol_type = other DNA
atagcccatcacgatg

SEQ ID NO: 2917 - DNA, 16 bp, synthetic construct
  source 1..16: mol_type = other DNA
  modified_base 5: mod_base = OTHER; note = uracil
gaagtttgaagaatgc

SEQ ID NO: 2918 - DNA, 16 bp, synthetic construct
  source 1..16: mol_type = other DNA
  modified_base 5: mod_base = OTHER; note = uracil
aggattaaggagttct

SEQ ID NO: 2919 - DNA, 16 bp, synthetic construct
  source 1..16: mol_type = other DNA
  modified_base 5: mod_base = OTHER; note = uracil
catttagaggcattgc

SEQ ID NO: 2920 - DNA, 16 bp, synthetic construct
  source 1..16: mol_type = other DNA
gtctcattaaatcaag

SEQ ID NO: 2921 - DNA, 16 bp, synthetic construct
  source 1..16: mol_type = other DNA
  modified_base 5: mod_base = OTHER; note = uracil
tcattaaatcaaggca

SEQ ID NO: 2922 - DNA, 16 bp, synthetic construct
  source 1..16: mol_type = other DNA
  modified_base 5: mod_base = OTHER; note = uracil
tttattatagggttga

SEQ ID NO: 2923 - DNA, 16 bp, synthetic construct
  source 1..16: mol_type = other DNA
  modified_base 5: mod_base = OTHER; note = uracil
acaatgctgattcagg

SEQ ID NO: 2924 - DNA, 16 bp, synthetic construct
  source 1..16: mol_type = other DNA
  modified_base 5: mod_base = OTHER; note = uracil
gatattgtataaggtt

SEQ ID NO: 2925 - DNA, 16 bp, synthetic construct
  source 1..16: mol_type = other DNA
  modified_base 5: mod_base = OTHER; note = uracil
tcttttgaatctgtcc

SEQ ID NO: 2926 - DNA, 16 bp, synthetic construct
  source 1..16: mol_type = other DNA
  modified_base 5: mod_base = OTHER; note = uracil
cagttaacagcgcggt

SEQ ID NO: 2927 - DNA, 16 bp, synthetic construct
  source 1..16: mol_type = other DNA
  modified_base 5: mod_base = OTHER; note = uracil
gatattagctcatgga

SEQ ID NO: 2928 - DNA, 16 bp, synthetic construct
  source 1..16: mol_type = other DNA
cactccttgaaattcc

SEQ ID NO: 2929 - DNA, 16 bp, synthetic construct
  source 1..16: mol_type = other DNA
gtcagatttaataggt

SEQ ID NO: 2930 - DNA, 16 bp, synthetic construct
  source 1..16: mol_type = other DNA
  modified_base 5: mod_base = OTHER; note = uracil
agtatgatagcacaaa

SEQ ID NO: 2931 - DNA, 16 bp, synthetic construct
  source 1..16: mol_type = other DNA
  modified_base 5: mod_base = OTHER; note = uracil
attgttatactgatgg

SEQ ID NO: 2932 - DNA, 16 bp, synthetic construct
  source 1..16: mol_type = other DNA
  modified_base 5: mod_base = OTHER; note = uracil
gttatactgatgggct

SEQ ID NO: 2933 - DNA, 16 bp, synthetic construct
  source 1..16: mol_type = other DNA
  modified_base 5: mod_base = OTHER; note = uracil
gggctgtaaactttgt

SEQ ID NO: 2934 - DNA, 16 bp, synthetic construct
  source 1..16: mol_type = other DNA
  modified_base 5: mod_base = OTHER; note = uracil
ggaattgaagttaggg

SEQ ID NO: 2935 - DNA, 16 bp, synthetic construct
  source 1..16: mol_type = other DNA
ctctctgtgttttacg

SEQ ID NO: 2936 - DNA, 16 bp, synthetic construct
  source 1..16: mol_type = other DNA
ccaggattcatcccaa

SEQ ID NO: 2937 - DNA, 16 bp, synthetic construct
  source 1..16: mol_type = other DNA
tgtgaagcttagaacc

SEQ ID NO: 2938 - DNA, 16 bp, synthetic construct
  source 1..16: mol_type = other DNA
  modified_base 5: mod_base = OTHER; note = uracil
tttatgagttaaaggg

SEQ ID NO: 2939 - DNA, 16 bp, synthetic construct
  source 1..16: mol_type = other DNA
  modified_base 5: mod_base = OTHER; note = uracil
tatctattggagaagt

SEQ ID NO: 2940 - DNA, 16 bp, synthetic construct
  source 1..16: mol_type = other DNA
  modified_base 5: mod_base = OTHER; note = uracil
ctattggagaagtgta

SEQ ID NO: 2941 - DNA, 16 bp, synthetic construct
  source 1..16: mol_type = other DNA
ctctgtgttttacgac

SEQ ID NO: 2942 - DNA, 16 bp, synthetic construct
  source 1..16: mol_type = other DNA
  modified_base 5: mod_base = OTHER; note = uracil
gttttacgactggcag

SEQ ID NO: 2943 - DNA, 16 bp, synthetic construct
  source 1..16: mol_type = other DNA
  modified_base 5: mod_base = OTHER; note = uracil
aacctcttgcaccttt

SEQ ID NO: 2944 - DNA, 16 bp, synthetic construct
  source 1..16: mol_type = other DNA
tttcctccgttgttac

SEQ ID NO: 2945 - DNA, 16 bp, synthetic construct
  source 1..16: mol_type = other DNA
ctccgttgttacttca

SEQ ID NO: 2946 - DNA, 16 bp, synthetic construct
  source 1..16: mol_type = other DNA
tttgcagtgatgtctc

SEQ ID NO: 2947 - DNA, 16 bp, synthetic construct
  source 1..16: mol_type = other DNA
ggagctttccaggatt

SEQ ID NO: 2948 - DNA, 16 bp, synthetic construct
  source 1..16: mol_type = other DNA
ttccaggattcatccc

SEQ ID NO: 2949 - DNA, 16 bp, synthetic construct
  source 1..16: mol_type = other DNA
tccccctgatgtcctc

SEQ ID NO: 2950 - DNA, 16 bp, synthetic construct
  source 1..16: mol_type = other DNA
  modified_base 5: mod_base = OTHER; note = uracil
ataatgtgaagcttag

SEQ ID NO: 2951 - DNA, 16 bp, synthetic construct
  source 1..16: mol_type = other DNA
  modified_base 5: mod_base = OTHER; note = uracil
gtaatattaaagccag

SEQ ID NO: 2952 - DNA, 16 bp, synthetic construct
  source 1..16: mol_type = other DNA
ggtgattttaagagtc

SEQ ID NO: 2953 - DNA, 16 bp, synthetic construct
  source 1..16: mol_type = other DNA
agaagtgttgtccaaa

SEQ ID NO: 2954 - DNA, 16 bp, synthetic construct
  source 1..16: mol_type = other DNA
  modified_base 5: mod_base = OTHER; note = uracil
gaagttattatatggc

SEQ ID NO: 2955 - DNA, 16 bp, synthetic construct
  source 1..16: mol_type = other DNA
  modified_base 5: mod_base = OTHER; note = uracil
gttattatatggctgt

SEQ ID NO: 2956 - DNA, 16 bp, synthetic construct
  source 1..16: mol_type = other DNA
atctcaatattgtgtg

SEQ ID NO: 2957 - DNA, 16 bp, synthetic construct
  source 1..16: mol_type = other DNA
  modified_base 5: mod_base = OTHER; note = uracil
gaaatacctgagtgac

SEQ ID NO: 2958 - DNA, 16 bp, synthetic construct
  source 1..16: mol_type = other DNA
  modified_base 5: mod_base = OTHER; note = uracil
aatctataggatgctg

SEQ ID NO: 2959 - DNA, 16 bp, synthetic construct
  source 1..16: mol_type = other DNA
aaaccagctgatgaga

SEQ ID NO: 2960 - DNA, 16 bp, synthetic construct
  source 1..16: mol_type = other DNA
  modified_base 5: mod_base = OTHER; note = uracil
acatttagaggcattg

SEQ ID NO: 2961 - DNA, 16 bp, synthetic construct
  source 1..16: mol_type = other DNA
  modified_base 5: mod_base = OTHER; note = uracil
ctcattaaatcaaggc

SEQ ID NO: 2962 - DNA, 16 bp, synthetic construct
  source 1..16: mol_type = other DNA
gtaaggcaatggactc

SEQ ID NO: 2963 - DNA, 16 bp, synthetic construct
  source 1..16: mol_type = other DNA
  modified_base 5: mod_base = OTHER; note = uracil
ctgctcattaagttct

SEQ ID NO: 2964 - DNA, 16 bp, synthetic construct
  source 1..16: mol_type = other DNA
aatgctgattcaggca

SEQ ID NO: 2965 - DNA, 16 bp, synthetic construct
  source 1..16: mol_type = other DNA
  modified_base 5: mod_base = OTHER; note = uracil
attgtataaggttagg

SEQ ID NO: 2966 - DNA, 16 bp, synthetic construct
  source 1..16: mol_type = other DNA
ccgtcaagtaatgagt

SEQ ID NO: 2967 - DNA, 16 bp, synthetic construct
  source 1..16: mol_type = other DNA
  modified_base 5: mod_base = OTHER; note = uracil
gatcttttgaatctgt

SEQ ID NO: 2968 - DNA, 16 bp, synthetic construct
  source 1..16: mol_type = other DNA
ttttgaatctgtccag

SEQ ID NO: 2969 - DNA, 16 bp, synthetic construct
  source 1..16: mol_type = other DNA
gtaccattactgagat

SEQ ID NO: 2970 - DNA, 16 bp, synthetic construct
  source 1..16: mol_type = other DNA
  modified_base 5: mod_base = OTHER; note = uracil
ccagttaacagcgcgg

SEQ ID NO: 2971 - DNA, 16 bp, synthetic construct
  source 1..16: mol_type = other DNA
  modified_base 5: mod_base = OTHER; note = uracil
agtattaaccaccatt

SEQ ID NO: 2972 - DNA, 16 bp, synthetic construct
  source 1..16: mol_type = other DNA
tgtcagatttaatagg

SEQ ID NO: 2973 - DNA, 16 bp, synthetic construct
  source 1..16: mol_type = other DNA
ggaaatgattctggct

SEQ ID NO: 2974 - DNA, 16 bp, synthetic construct
  source 1..16: mol_type = other DNA
tcaggaattgaagtta

SEQ ID NO: 2975 - DNA, 16 bp, synthetic construct
  source 1..16: mol_type = other DNA
gtttcaaactgggagc

SEQ ID NO: 2976 - DNA, 16 bp, synthetic construct
  source 1..16: mol_type = other DNA
  modified_base 5: mod_base = OTHER; note = uracil
atgctgggtctctctc

SEQ ID NO: 2977 - DNA, 16 bp, synthetic construct
  source 1..16: mol_type = other DNA
  modified_base 5: mod_base = OTHER; note = uracil
gttgttacttcagctg

SEQ ID NO: 2978 - DNA, 16 bp, synthetic construct
  source 1..16: mol_type = other DNA
  modified_base 5: mod_base = OTHER; note = uracil
gttctttgcagtgatg

SEQ ID NO: 2979 - DNA, 16 bp, synthetic construct
  source 1..16: mol_type = other DNA
  modified_base 5: mod_base = OTHER; note = uracil
attgtgtgtctcaggc

SEQ ID NO: 2980 - DNA, 16 bp, synthetic construct
  source 1..16: mol_type = other DNA
atttcagtgctcccca

SEQ ID NO: 2981 - DNA, 16 bp, synthetic construct
  source 1..16: mol_type = other DNA
acctgagtgactgatc

SEQ ID NO: 2982 - DNA, 16 bp, synthetic construct
  source 1..16: mol_type = other DNA
tacgactggcagtgtc

SEQ ID NO: 2983 - DNA, 16 bp, synthetic construct
  source 1..16: mol_type = other DNA
  modified_base 5: mod_base = OTHER; note = uracil
ccactagaatagccca

SEQ ID NO: 2984 - DNA, 16 bp, synthetic construct
  source 1..16: mol_type = other DNA
agcccatcacgatgcc

SEQ ID NO: 2985 - DNA, 16 bp, synthetic construct
  source 1..16: mol_type = other DNA
  modified_base 5: mod_base = OTHER; note = uracil
agtatccttcaatggc

SEQ ID NO: 2986 - DNA, 16 bp, synthetic construct
  source 1..16: mol_type = other DNA
  modified_base 5: mod_base = OTHER; note = uracil
ttaattaggattaagg

SEQ ID NO: 2987 - DNA, 16 bp, synthetic construct
  source 1..16: mol_type = other DNA
  modified_base 5: mod_base = OTHER; note = uracil
gcactgtagtataaag

SEQ ID NO: 2988 - DNA, 16 bp, synthetic construct
  source 1..16: mol_type = other DNA
  modified_base 5: mod_base = OTHER; note = uracil
taaatcaaggcaagtg

SEQ ID NO: 2989 - DNA, 16 bp, synthetic construct
  source 1..16: mol_type = other DNA
agctgctcattaagtt

SEQ ID NO: 2990 - DNA, 16 bp, synthetic construct
  source 1..16: mol_type = other DNA
tgctgattcaggcagt

SEQ ID NO: 2991 - DNA, 16 bp, synthetic construct
  source 1..16: mol_type = other DNA
  modified_base 5: mod_base = OTHER; note = uracil
tgtataaggttaggtg

SEQ ID NO: 2992 - DNA, 16 bp, synthetic construct
  source 1..16: mol_type = other DNA
gtaccgtcaagtaatg

SEQ ID NO: 2993 - DNA, 16 bp, synthetic construct
  source 1..16: mol_type = other DNA
ttgaatctgtccagct

SEQ ID NO: 2994 - DNA, 16 bp, synthetic construct
  source 1..16: mol_type = other DNA
gtctccagttaacagc

SEQ ID NO: 2995 - DNA, 16 bp, synthetic construct
  source 1..16: mol_type = other DNA
aacagcgcggtgagat

SEQ ID NO: 2996 - DNA, 16 bp, synthetic construct
  source 1..16: mol_type = other DNA
tagcccatcacgatgc

SEQ ID NO: 2997 - DNA, 16 bp, synthetic construct
  source 1..16: mol_type = other DNA
ttagctcatggaaagc

SEQ ID NO: 2998 - DNA, 16 bp, synthetic construct
  source 1..16: mol_type = other DNA
  modified_base 5: mod_base = OTHER; note = uracil
gcactgtgtattaggt

SEQ ID NO: 2999 - DNA, 16 bp, synthetic construct
  source 1..16: mol_type = other DNA
  modified_base 5: mod_base = OTHER; note = uracil
atgatagcacaaacca

SEQ ID NO: 3000 - DNA, 16 bp, synthetic construct
  source 1..16: mol_type = other DNA
atgggctgtaaacttt

SEQ ID NO: 3001 - DNA, 16 bp, synthetic construct
  source 1..16: mol_type = other DNA
tgggctgtaaactttg

SEQ ID NO: 3002 - DNA, 16 bp, synthetic construct
  source 1..16: mol_type = other DNA
  modified_base 5: mod_base = OTHER; note = uracil
atggtttcaaactggg

SEQ ID NO: 3003 - DNA, 16 bp, synthetic construct
  source 1..16: mol_type = other DNA
tccgttgttacttcag

SEQ ID NO: 3004 - DNA, 16 bp, synthetic construct
  source 1..16: mol_type = other DNA
gcagtgatgtctcaaa

SEQ ID NO: 3005 - DNA, 16 bp, synthetic construct
  source 1..16: mol_type = other DNA
gctttccaggattcat

SEQ ID NO: 3006 - DNA, 16 bp, synthetic construct
  source 1..16: mol_type = other DNA
gaagtgttgtccaaaa

SEQ ID NO: 3007 - DNA, 16 bp, synthetic construct
  source 1..16: mol_type = other DNA
atattgtgtgtctcag

SEQ ID NO: 3008 - DNA, 16 bp, synthetic construct
  source 1..16: mol_type = other DNA
cttttgaatctgtcca

SEQ ID NO: 3009 - DNA, 16 bp, synthetic construct
  source 1..16: mol_type = other DNA
actttcagatattagc

SEQ ID NO: 3010 - DNA, 16 bp, synthetic construct
  source 1..16: mol_type = other DNA
aacctcttgcaccttt

SEQ ID NO: 3011 - DNA, 16 bp, synthetic construct
  source 1..16: mol_type = other DNA
ttcctccgttgttact

SEQ ID NO: 3012 - DNA, 16 bp, synthetic construct
  source 1..16: mol_type = other DNA
gagctttccaggattc

SEQ ID NO: 3013 - DNA, 16 bp, synthetic construct
  source 1..16: mol_type = other DNA
gtgattttaagagtcc

SEQ ID NO: 3014 - DNA, 16 bp, synthetic construct
  source 1..16: mol_type = other DNA
ttagtatccttcaatg

SEQ ID NO: 3015 - DNA, 16 bp, synthetic construct
  source 1..16: mol_type = other DNA
gtgatattgtataagg

SEQ ID NO: 3016 - DNA, 16 bp, synthetic construct
  source 1..16: mol_type = other DNA
gggctgtaaactttgt

SEQ ID NO: 3017 - DNA, 16 bp, synthetic construct
  source 1..16: mol_type = other DNA
cctcttgcacctttct

SEQ ID NO: 3018 - DNA, 16 bp, synthetic construct
  source 1..16: mol_type = other DNA
ccgttgttacttcagc

SEQ ID NO: 3019 - DNA, 16 bp, synthetic construct
  source 1..16: mol_type = other DNA
tctttgcagtgatgtc

SEQ ID NO: 3020 - DNA, 16 bp, synthetic construct
  source 1..16: mol_type = other DNA
ctgctcattaagttct

SEQ ID NO: 3021 - DNA, 16 bp, synthetic construct
  source 1..16: mol_type = other DNA
accgtcaagtaatgag

SEQ ID NO: 3022 - DNA, 16 bp, synthetic construct
  source 1..16: mol_type = other DNA
ggtttcaaactgggag

SEQ ID NO: 3023 - DNA, 16 bp, synthetic construct
  source 1..16: mol_type = other DNA
atgctgggtctctctc

SEQ ID NO: 3024 - DNA, 16 bp, synthetic construct
  source 1..16: mol_type = other DNA
actttcctccgttgtt

SEQ ID NO: 3025 - DNA, 16 bp, synthetic construct
  source 1..16: mol_type = other DNA
gttgttacttcagctg

SEQ ID NO: 3026 - DNA, 16 bp, synthetic construct
  source 1..16: mol_type = other DNA
gttctttgcagtgatg

SEQ ID NO: 3027 - DNA, 16 bp, synthetic construct
  source 1..16: mol_type = other DNA
gtgatgtctcaaaatc

SEQ ID NO: 3028 - DNA, 16 bp, synthetic construct
  source 1..16: mol_type = other DNA
attgtgtgtctcaggc

SEQ ID NO: 3029 - DNA, 16 bp, synthetic construct
  source 1..16: mol_type = other DNA
tctctgtgttttacga

SEQ ID NO: 3030 - DNA, 16 bp, synthetic construct
  source 1..16: mol_type = other DNA
agtatccttcaatggc

SEQ ID NO: 3031 - DNA, 16 bp, synthetic construct
  source 1..16: mol_type = other DNA
gcactgtagtataaag

SEQ ID NO: 3032 - DNA, 16 bp, synthetic construct
  source 1..16: mol_type = other DNA
gcactgtgtattaggt

SEQ ID NO: 3033 - DNA, 16 bp, synthetic construct
  source 1..16: mol_type = other DNA
atgatagcacaaacca

SEQ ID NO: 3034 - DNA, 16 bp, synthetic construct
  source 1..16: mol_type = other DNA
taaatcaaggcaagtg

SEQ ID NO: 3035 - DNA, 16 bp, synthetic construct
  source 1..16: mol_type = other DNA
cgccgataaggtacac

SEQ ID NO: 3036 - DNA, 16 bp, synthetic construct
  source 1..16: mol_type = other DNA
  modified_base 1: mod_base = OTHER; note = cEt  adenosine 3'-phosphorothioate
  modified_base 2: mod_base = OTHER; note = cEt thymidine 3'-phosphorothioate
  modified_base 3: mod_base = OTHER; note = cEt 5-methyl cytidine 3'-phosphorothioate
  modified_base 4: mod_base = OTHER; note = 2'-deoxythymidine 3'-phosphorothioate
  modified_base 5: mod_base = OTHER; note = 2'-deoxyadenosine 3'-phosphorothioate
  modified_base 6..7: mod_base = OTHER; note = 2'-deoxythymidine 3'-phosphorothioate
  modified_base 8..9: mod_base = OTHER; note = 2'-deoxyguanosine 3'-phosphorothioate
  modified_base 10: mod_base = OTHER; note = 2'-deoxyadenosine 3'-phosphorothioate
  modified_base 11: mod_base = OTHER; note = 2'-deoxyguanosine 3'-phosphorothioate
  modified_base 12..13: mod_base = OTHER; note = 2'-deoxyadenosine 3'-phosphorothioate
  modified_base 14: mod_base = OTHER; note = cEt guanosine 3'-phosphorothioate
  modified_base 15: mod_base = OTHER; note = cEt thymidine 3'-phosphorothioate
  modified_base 16: mod_base = OTHER; note = cEt guanosine
atctattggagaagtg

SEQ ID NO: 3037 - DNA, 16 bp, synthetic construct
  source 1..16: mol_type = other DNA
  modified_base <1: mod_base = OTHER; note = THA-GalNAc phosphodiester
  modified_base 1: mod_base = OTHER; note = cEt  adenosine 3'-phosphorothioate
  modified_base 2: mod_base = OTHER; note = cEt thymidine 3'-phosphorothioate
  modified_base 3: mod_base = OTHER; note = cEt 5-methyl cytidine 3'-phosphorothioate
  modified_base 4: mod_base = OTHER; note = 2'-deoxythymidine 3'-phosphorothioate
  modified_base 5: mod_base = OTHER; note = 2'-deoxyadenosine 3'-phosphorothioate
  modified_base 6..7: mod_base = OTHER; note = 2'-deoxythymidine 3'-phosphorothioate
  modified_base 8..9: mod_base = OTHER; note = 2'-deoxyguanosine 3'-phosphorothioate
  modified_base 10: mod_base = OTHER; note = 2'-deoxyadenosine 3'-phosphorothioate
  modified_base 11: mod_base = OTHER; note = 2'-deoxyguanosine 3'-phosphorothioate
  modified_base 12..13: mod_base = OTHER; note = 2'-deoxyadenosine 3'-phosphorothioate
  modified_base 14: mod_base = OTHER; note = cEt guanosine 3'-phosphorothioate
  modified_base 15: mod_base = OTHER; note = cEt thymidine 3'-phosphorothioate
  modified_base 16: mod_base = OTHER; note = cEt guanosine
atctattggagaagtg

SEQ ID NO: 3038 - DNA, 16 bp, synthetic construct
  source 1..16: mol_type = other DNA
  modified_base 1: mod_base = OTHER; note = cEt  adenosine 3'-phosphorothioate
  modified_base 2: mod_base = OTHER; note = cEt guanosine 3'-phosphorothioate
  modified_base 3: mod_base = OTHER; note = cEt thymidine 3'-phosphorothioate
  modified_base 4: mod_base = OTHER; note = 2'-deoxyadenosine 3'-phosphorothioate
  modified_base 5: mod_base = OTHER; note = 2'-deoxythymidine 3'-phosphorothioate
  modified_base 6..8: mod_base = OTHER; note = 2'-deoxyadenosine 3'-phosphorothioate
  modified_base 9: mod_base = OTHER; note = 2'-deoxyguanosine 3'-phosphorothioate
  modified_base 10..11: mod_base = OTHER; note = 2'-deoxyadenosine 3'-phosphorothioate
  modified_base 12: mod_base = OTHER; note = 2'-deoxyguanosine 3'-phosphorothioate
  modified_base 13: mod_base = OTHER; note = 2'-deoxythymidine 3'-phosphorothioate
  modified_base 14: mod_base = OTHER; note = cEt guanosine 3'-phosphorothioate
  modified_base 15..16: mod_base = OTHER; note = cEt thymidine
agtataaagaagtgtt

SEQ ID NO: 3039 - DNA, 16 bp, synthetic construct
  source 1..16: mol_type = other DNA
  modified_base <1: mod_base = OTHER; note = cEt  adenosine 3'-phosphorothioate
  modified_base 1: mod_base = OTHER; note = cEt guanosine 3'-phosphorothioate
  modified_base 3: mod_base = OTHER; note = cEt thymidine 3'-phosphorothioate
  modified_base 4: mod_base = OTHER; note = 2'-deoxyadenosine 3'-phosphorothioate
  modified_base 5: mod_base = OTHER; note = 2'-deoxythymidine 3'-phosphorothioate
  modified_base 6..8: mod_base = OTHER; note = 2'-deoxyadenosine 3'-phosphorothioate
  modified_base 9: mod_base = OTHER; note = 2'-deoxyguanosine 3'-phosphorothioate
  modified_base 10..11: mod_base = OTHER; note = 2'-deoxyadenosine 3'-phosphorothioate
  modified_base 12: mod_base = OTHER; note = 2'-deoxyguanosine 3'-phosphorothioate
  modified_base 13: mod_base = OTHER; note = 2'-deoxythymidine 3'-phosphorothioate
  modified_base 14: mod_base = OTHER; note = cEt guanosine 3'-phosphorothioate
  modified_base 15..16: mod_base = OTHER; note = cEt thymidine
  modified_base 2: mod_base = OTHER; note = cEt guanosine 3'-phosphorothioate
agtataaagaagtgtt

SEQ ID NO: 3040 - DNA, 16 bp, synthetic construct
  source 1..16: mol_type = other DNA
  modified_base 1: mod_base = OTHER; note = cEt  5-methyl cytidine 3'-phosphorothioate
  modified_base 2: mod_base = OTHER; note = cEt thymidine 3'-phosphorothioate
  modified_base 3: mod_base = OTHER; note = 2'-deoxyadenosine 3'-phosphorothioate
  modified_base 4..5: mod_base = OTHER; note = 2'-deoxythymidine 3'-phosphorothioate
  modified_base 6..7: mod_base = OTHER; note = 2'-deoxyguanosine 3'-phosphorothioate
  modified_base 8: mod_base = OTHER; note = 2'-deoxyadenosine 3'-phosphorothioate
  modified_base 9: mod_base = OTHER; note = 2'-deoxyguanosine 3'-phosphorothioate
  modified_base 10..11: mod_base = OTHER; note = 2'-deoxyadenosine 3'-phosphorothioate
  modified_base 12: mod_base = OTHER; note = cEt guanosine 3'-phosphorothioate
  modified_base 13: mod_base = OTHER; note = 2'-MOE thymidine 3'-phosphorothioate
  modified_base 14: mod_base = OTHER; note = cEt guanosine 3'-phosphorothioate
  modified_base 15: mod_base = OTHER; note = 2'-MOE thymidine 3'-phosphorothioate
  modified_base 16: mod_base = OTHER; note = cEt adenosine
ctattggagaagtgta

SEQ ID NO: 3041 - DNA, 16 bp, synthetic construct
  source 1..16: mol_type = other DNA
  modified_base <1: mod_base = OTHER; note = THA-GalNAc phosphodiester
  modified_base 1: mod_base = OTHER; note = cEt  5-methyl cytidine 3'-phosphorothioate
  modified_base 2: mod_base = OTHER; note = cEt thymidine 3'-phosphorothioate
  modified_base 3: mod_base = OTHER; note = 2'-deoxyadenosine 3'-phosphorothioate
  modified_base 4..5: mod_base = OTHER; note = 2'-deoxythymidine 3'-phosphorothioate
  modified_base 6..7: mod_base = OTHER; note = 2'-deoxyguanosine 3'-phosphorothioate
  modified_base 8: mod_base = OTHER; note = 2'-deoxyadenosine 3'-phosphorothioate
  modified_base 9: mod_base = OTHER; note = 2'-deoxyguanosine 3'-phosphorothioate
  modified_base 10..11: mod_base = OTHER; note = 2'-deoxyadenosine 3'-phosphorothioate
  modified_base 12: mod_base = OTHER; note = cEt guanosine 3'-phosphorothioate
  modified_base 13: mod_base = OTHER; note = 2'-MOE thymidine 3'-phosphorothioate
  modified_base 14: mod_base = OTHER; note = cEt guanosine 3'-phosphorothioate
  modified_base 15: mod_base = OTHER; note = 2'-MOE thymidine 3'-phosphorothioate
  modified_base 16: mod_base = OTHER; note = cEt adenosine
ctattggagaagtgta

1-42. (canceled)

43. An oligomeric compound comprising a modified oligonucleotide according to the following chemical notation: AₖₛTₖₛ^{m}CₖₛT_{ds}A_{ds}T_{ds}T_{ds}G_{ds}G_{ds}A_{ds}G_{ds}A_{ds}A_{ds}GₖₛTₖₛGₖ (SEQ ID NO: 3036), wherein
A=an adenine nucleobase,
^{m}C=a 5-methyl cytosine nucleobase,
G=a guanine nucleobase,
T=a thymine nucleobase,
k=a cEt sugar moiety,
d=a 2′-β-D-deoxyribosyl sugar moiety, and
s=a phosphorothioate internucleoside linkage.

44-45. (canceled)

46. The oligomeric compound of claim 43, wherein the oligomeric compound comprises a conjugate group.

47-51. (canceled)

52. The oligomeric compound of claim 46, wherein the conjugate group is attached to the modified oligonucleotide at the 5′-end of the modified oligonucleotide.

53. The oligomeric compound of claim 46, wherein the conjugate group is attached to the modified oligonucleotide at the 3′-end of the modified oligonucleotide.

54. (canceled)

55. The oligomeric compound of claim 46, wherein the conjugate group has the following structure:

[chemical structure]

56. (canceled)

57. An oligomeric compound comprising a modified oligonucleotide and a conjugate group according to the following chemical notation: THA-GalNAc-ₒAₖₛTₖₛ^{m}CₖₛT_{ds}A_{ds}T_{ds}T_{ds}G_{ds}G_{ds}A_{ds}G_{ds}A_{ds}A_{ds}GₖₛTₖₛGₖ (SEQ ID NO: 3037), wherein
A=an adenine nucleobase,
^{m}C=a 5-methyl cytosine nucleobase,
G=a guanine nucleobase,
T=a thymine nucleobase,
k=a cEt sugar moiety,
d=a 2′-β-D-deoxyribosyl sugar moiety,
s=a phosphorothioate internucleoside linkage, and
THA-GalNAc-ₒ=

[chemical structure]

58-61. (canceled)

62. An oligomeric compound according to the following chemical structure: [chemical structure]
or a salt thereof.

63. The oligomeric compound of claim 62, which is the sodium salt or the potassium salt.

64. An oligomeric compound according to the following chemical structure:

[chemical structure]

65-108. (canceled)

109. A pharmaceutical composition comprising the oligomeric compound of claim 62 or claim 64, and a pharmaceutically acceptable diluent or carrier.

110-112. (canceled)

113. A method of treating a disease associated with PSD3 comprising administering to a subject having a disease associated with PSD3 a therapeutically effective amount of the oligomeric compound of claim 62 or claim 64.

114. (canceled)

115. (canceled)

116. A method of reducing expression of PSD3 in a cell comprising contacting the cell with the oligomeric compound of claim 62 or claim 64.

117. The method of claim 116, wherein the cell is a liver cell.

118-119. (canceled)
